(19) United States
(12) Patent Application Publication
(10) Pub. No.: US 2006/0223090 A1
(43) Pub. Date: Oct. 5, 2006

(54) Polynucleotides encoding human secreted proteins

(76) Inventors: Craig A. Rosen, Laytonsville, MD (US); Steven M. Ruben, Brookeville, MD (US)

Correspondence Address: HUMAN GENOME SCIENCES INC., 14200 SHADY GROVE ROAD, ROCKVILLE, MD, 20850, US

(21) Appl. No.: 11/366,980

(22) Filed: Mar. 3, 2006

Related U.S. Application Data
(63) Continuation-in-part of application No. 10/664,359, filed on Sep. 20, 2003, now abandoned.
Application No. 10/664,359 is a continuation-in-part of application No. PCT/US02/08279, filed on Mar. 19, 2002.
Application No. PCT/US02/08279 is a continuation-in-part of application No. 10/100,683, filed on Mar. 19, 2002.
Application No. PCT/US02/08279 is a continuation-in-part of application No. 09/981,876, filed on Oct. 19, 2001, now Pat. No. 7,053,190.
Application No. 09/981,876 is a division of application No. 09/621,011, filed on Jul. 20, 2000, now Pat. No. 6,878,687.
Application No. 09/621,011 is a continuation of application No. 09/148,545, filed on Sep. 4, 1998, now Pat. No. 6,590,075.
Application No. 09/148,545 is a continuation-in-part of application No. PCT/US98/04482, filed on Mar. 6, 1998.
Application No. 10/100,683 is a continuation-in-part of application No. 09/621,011, filed on Jul. 20, 2000, now Pat. No. 6,878,687.
Application No. 09/621,011 is a continuation of application No. 09/148,545, filed on Sep. 4, 1998, now Pat. No. 6,590,075.
Application No. 09/148,545 is a continuation-in-part of application No. PCT/US98/04482, filed on Mar. 6, 1998.
Application No. 10/100,683 is a continuation-in-part of application No. 09/148,545, filed on Sep. 4, 1998, now Pat. No. 6,590,075.
Application No. 09/148,545 is a continuation-in-part of application No. PCT/US98/04482, filed on Mar. 6, 1998.
Application No. 10/100,683 is a continuation-in-part of application No. PCT/US98/04482, filed on Mar. 6, 1998.
Application No. 10/100,683 is a continuation-in-part of application No. 09/882,171, filed on Jun. 18, 2001, now abandoned.
Application No. 09/882,171 is a continuation of application No. 09/809,391, filed on Mar. 16, 2001, now abandoned.
Application No. 09/809,391 is a continuation-in-part of application No. 09/149,476, filed on Sep. 8, 1998, now Pat. No. 6,420,526.
Application No. 09/149,476 is a continuation-in-part of application No. PCT/US98/04493, filed on Mar. 6, 1998.
Application No. 10/100,683 is a continuation-in-part of application No. 09/809,391, filed on Mar. 16, 2001, now abandoned.
Application No. 10/100,683 is a continuation-in-part of application No. 09/149,476, filed on Sep. 8, 1998, now Pat. No. 6,420,526.
Application No. 09/149,476 is a continuation-in-part of application No. PCT/US98/04493, filed on Mar. 6, 1998.
Application No. 10/100,683 is a continuation-in-part of application No. 09/149,476, filed on Sep. 8, 1998, now Pat. No. 6,420,526.
Application No. 09/149,476 is a continuation-in-part of application No. PCT/US98/04493, filed on Mar. 6, 1998.
Application No. 10/100,683 is a continuation-in-part of application No. PCT/US98/04493, filed on Mar. 6, 1998.
Application No. 10/100,683 is a continuation-in-part of application No. 10/058,993, filed on Jan. 30, 2002, now Pat. No. 6,951,924.
Application No. 10/100,683 is a continuation-in-part of application No. 09/852,659, filed on May 11, 2001, now abandoned.
Application No. 10/100,683 is a continuation-in-part of application No. 09/152,060, filed on Sep. 11, 1998, now Pat. No. 6,448,230.
Application No. 09/152,060 is a continuation-in-part of application No. PCT/US98/04858, filed on Mar. 12, 1998.
Application No. 10/058,993 is a continuation-in-part of application No. 09/853,161, filed on May 11, 2001, now Pat. No. 6,919,433.
Application No. 09/853,161 is a continuation-in-part of application No. 09/152,060, filed on Sep. 11, 1998, now Pat. No. 6,448,230.
Application No. 09/152,060 is a continuation-in-part of application No. PCT/US98/04858, filed on Mar. 12, 1998.
Application No. 10/058,993 is a continuation-in-part of application No. 09/852,797, filed on May 11, 2001, now Pat. No. 6,878,806.
Application No. 09/852,797 is a continuation-in-part of application No. 09/152,060, filed on Sep. 11, 1998, now Pat. No. 6,448,230.
Application No. 09/152,060 is a continuation-in-part of application No. PCT/US98/04858, filed on Mar. 12, 1998.
Application No. 10/100,683 is a continuation-in-part of application No. 09/852,659, filed on May 11, 2001, now abandoned.
Application No. 10/100,683 is a continuation-in-part of application No. 09/152,060, filed on Sep. 11, 1998, now Pat. No. 6,448,230.
Application No. 09/152,060 is a continuation-in-part of application No. PCT/US98/04858, filed on Mar. 12, 1998.
Application No. 10/100,683 is a continuation-in-part of application No. 09/853,161, filed on May 11, 2001, now Pat. No. 6,919,433.
Application No. 10/100,683 is a continuation-in-part of application No. 09/152,060, filed on Sep. 11, 1998, now Pat. No. 6,448,230.
Application No. 09/152,060 is a continuation-in-part of application No. PCT/US98/04858, filed on Mar. 12, 1998.
Application No. 10/100,683 is a continuation-in-part of application No. 09/852,797, filed on May 11, 2001, now Pat. No. 6,878,806.
Application No. 10/100,683 is a continuation-in-part of application No. 09/152,060, filed on Sep. 11, 1998, now Pat. No. 6,448,230.
Application No. 09/152,060 is a continuation-in-part of application No. PCT/US98/04858, filed on Mar. 12, 1998.
Application No. 10/100,683 is a continuation-in-part of application No. 09/152,060, filed on Sep. 11, 1998, now Pat. No. 6,448,230.
Application No. 09/152,060 is a continuation-in-part of application No. PCT/US98/04858, filed on Mar. 12, 1998.
Application No. 10/100,683 is a continuation-in-part of application No. PCT/US98/04858, filed on Mar. 12, 1998.
Application No. 10/100,683 is a continuation-in-part of application No. 10/059,395, filed on Jan. 31, 2002, now abandoned.
Application No. 10/059,395 is a division of application No. 09/966,262, filed on Oct. 1, 2001, now abandoned.
Application No. 09/966,262 is a continuation of application No. 09/154,707, filed on Sep. 17, 1998, now abandoned.
Application No. 09/154,707 is a continuation-in-part of application No. PCT/US98/05311, filed on Mar. 19, 1998, now abandoned.
Application No. 10/100,683 is a continuation-in-part of application No. 09/984,245, filed on Oct. 29, 2001, now abandoned.
Application No. 09/984,245 is a division of application No. 09/154,707, filed on Sep. 17, 1998, now abandoned.
Application No. 09/154,707 is a continuation-in-part of application No. PCT/US98/05311, filed on Mar. 19, 1998, now abandoned.
Application No. 10/100,683 is a continuation-in-part of application No. 09/983,966, filed on Oct. 26, 2001, now abandoned.
Application No. 09/983,966 is a division of application No. 09/154,707, filed on Sep. 17, 1998, now abandoned.
Application No. 09/154,707 is a continuation-in-part of application No. PCT/US98/05311, filed on Mar. 19, 1998, now abandoned.
Application No. 10/100,683 is a continuation-in-part of application No. 09/966,262, filed on Oct. 1, 2001, now abandoned.
Application No. 09/966,262 is a continuation of application No. 09/154,707, filed on Sep. 17, 1998, now abandoned.
Application No. 09/154,707 is a continuation-in-part of application No. PCT/US98/05311, filed on Mar. 19, 1998, now abandoned.
Application No. 10/100,683 is a continuation-in-part of application No. 09/154,707, filed on Sep. 17, 1998, now abandoned.
Application No. 09/154,707 is a continuation-in-part of application No. PCT/US98/05311, filed on Mar. 19, 1998, now abandoned.
Application No. 10/100,683 is a continuation-in-part of application No. PCT/US98/05311, filed on Mar. 19, 1998, now abandoned.
Application No. 10/100,683 is a continuation-in-part of application No. 09/814,122, filed on Mar. 22, 2001, now abandoned.
Application No. 09/814,122 is a continuation of application No. 09/577,145, filed on May 24, 2000, now abandoned.
Application No. 09/577,145 is a continuation of application No. 09/166,780, filed on Oct. 6, 1998, now abandoned.
Application No. 09/166,780 is a continuation-in-part of application No. PCT/US98/06801, filed on Apr. 7, 1998.
Application No. 10/100,683 is a continuation-in-part of application No. PCT/US98/06801, filed on Apr. 7, 1998.
Application No. 10/100,683 is a continuation-in-part of application No. PCT/US98/06801, filed on Apr. 7, 1998.
Application No. 10/100,683 is a continuation-in-part of application No. PCT/US98/10868, filed on May 28, 1998.
Application No. 10/100,683 is a continuation-in-part of application No. PCT/US98/11422, filed on Jun. 4, 1998.
(60) Provisional application No. 60/277,340, filed on Mar. 21, 2001.
(60) Provisional application No. 60/306,171, filed on Jul. 19, 2001.
(60) Provisional application No. 60/331,287, filed on Nov. 13, 2001.
(60) Provisional application No. 60/040,162, filed on Mar. 7, 1997.
(60) Provisional application No. 60/040,333, filed on Mar. 7, 1997.
(60) Provisional application No. 60/038,621, filed on Mar. 7, 1997.
(60) Provisional application No. 60/040,161, filed on Mar. 7, 1997.
(60) Provisional application No. 60/040,626, filed on Mar. 7, 1997.
(60) Provisional application No. 60/040,334, filed on Mar. 7, 1997.
(60) Provisional application No. 60/040,336, filed on Mar. 7, 1997.
(60) Provisional application No. 60/040,163, filed on Mar. 7, 1997.
(60) Provisional application No. 60/047,615, filed on May 23, 1997.
(60) Provisional application No. 60/047,600, filed on May 23, 1997.
(60) Provisional application No. 60/047,597, filed on May 23, 1997.
(60) Provisional application No. 60/047,502, filed on May 23, 1997.
(60) Provisional application No. 60/047,633, filed on May 23, 1997.
(60) Provisional application No. 60/047,583, filed on May 23, 1997.
(60) Provisional application No. 60/047,617, filed on May 23, 1997.
(60) Provisional application No. 60/047,618, filed on May 23, 1997.
(60) Provisional application No. 60/047,503, filed on May 23, 1997.
(60) Provisional application No. 60/047,592, filed on May 23, 1997.
(60) Provisional application No. 60/047,581, filed on May 23, 1997.
(60) Provisional application No. 60/047,584, filed on May 23, 1997.
(60) Provisional application No. 60/047,500, filed on May 23, 1997.
(60) Provisional application No. 60/047,587, filed on May 23, 1997.
(60) Provisional application No. 60/047,492, filed on May 23, 1997.
(60) Provisional application No. 60/047,598, filed on May 23, 1997.
(60) Provisional application No. 60/047,613, filed on May 23, 1997.
(60) Provisional application No. 60/047,582, filed on May 23, 1997.
(60) Provisional application No. 60/047,596, filed on May 23, 1997.
(60) Provisional application No. 60/047,612, filed on May 23, 1997.
(60) Provisional application No. 60/047,632, filed on May 23, 1997.
(60) Provisional application No. 60/047,601, filed on May 23, 1997.
(60) Provisional application No. 60/043,580, filed on Apr. 11, 1997.
(60) Provisional application No. 60/043,568, filed on Apr. 11, 1997.
(60) Provisional application No. 60/043,314, filed on Apr. 11, 1997.
(60) Provisional application No. 60/043,569, filed on Apr. 11, 1997.
(60) Provisional application No. 60/043,311, filed on Apr. 11, 1997.
(60) Provisional application No. 60/043,671, filed on Apr. 11, 1997.
(60) Provisional application No. 60/043,674, filed on Apr. 11, 1997.
(60) Provisional application No. 60/043,669, filed on Apr. 11, 1997.
(60) Provisional application No. 60/043,312, filed on Apr. 11, 1997.
(60) Provisional application No. 60/043,313, filed on Apr. 11, 1997.
(60) Provisional application No. 60/043,672, filed on Apr. 11, 1997.
(60) Provisional application No. 60/043,315, filed on Apr. 11, 1997.
(60) Provisional application No. 60/048,974, filed on Jun. 6, 1997.
(60) Provisional application No. 60/056,886, filed on Aug. 22, 1997.
(60) Provisional application No. 60/056,877, filed on Aug. 22, 1997.
(60) Provisional application No. 60/056,889, filed on Aug. 22, 1997.
(60) Provisional application No. 60/056,893, filed on Aug. 22, 1997.
(60) Provisional application No. 60/056,630, filed on Aug. 22, 1997.
(60) Provisional application No. 60/056,878, filed on Aug. 22, 1997.
(60) Provisional application No. 60/056,662, filed on Aug. 22, 1997.
(60) Provisional application No. 60/056,872, filed on Aug. 22, 1997.
(60) Provisional application No. 60/056,882, filed on Aug. 22, 1997.
(60) Provisional application No. 60/056,637, filed on Aug. 22, 1997.
(60) Provisional application No. 60/056,903, filed on Aug. 22, 1997.
(60) Provisional application No. 60/056,888, filed on Aug. 22, 1997.
(60) Provisional application No. 60/056,879, filed on Aug. 22, 1997.
(60) Provisional application No. 60/056,880, filed on Aug. 22, 1997.
(60) Provisional application No. 60/056,894, filed on Aug. 22, 1997.
(60) Provisional application No. 60/056,911, filed on Aug. 22, 1997.
(60) Provisional application No. 60/056,636, filed on Aug. 22, 1997.
(60) Provisional application No. 60/056,874, filed on Aug. 22, 1997.
(60) Provisional application No. 60/056,910, filed on Aug. 22, 1997.
(60) Provisional application No. 60/056,864, filed on Aug. 22, 1997.
(60) Provisional application No. 60/056,631, filed on Aug. 22, 1997.
(60) Provisional application No. 60/056,845, filed on Aug. 22, 1997.
(60) Provisional application No. 60/056,892, filed on Aug. 22, 1997.
(60) Provisional application No. 60/047,595, filed on May 23, 1997.
(60) Provisional application No. 60/057,761, filed on Sep. 5, 1997.
(60) Provisional application No. 60/047,599, filed on May 23, 1997.
(60) Provisional application No. 60/047,588, filed on May 23, 1997.
(60) Provisional application No. 60/047,585, filed on May 23, 1997.
(60) Provisional application No. 60/047,586, filed on May 23, 1997.
(60) Provisional application No. 60/047,590, filed on May 23, 1997.
(60) Provisional application No. 60/047,594, filed on May 23, 1997.
(60) Provisional application No. 60/047,589, filed on May 23, 1997.
(60) Provisional application No. 60/047,593, filed on May 23, 1997.
(60) Provisional application No. 60/047,614, filed on May 23, 1997.
(60) Provisional application No. 60/043,578, filed on Apr. 11, 1997.
(60) Provisional application No. 60/043,576, filed on Apr. 11, 1997.
(60) Provisional application No. 60/047,501, filed on May 23, 1997.
(60) Provisional application No. 60/043,670, filed on Apr. 11, 1997.
(60) Provisional application No. 60/056,632, filed on Aug. 22, 1997.
(60) Provisional application No. 60/056,664, filed on Aug. 22, 1997.
(60) Provisional application No. 60/056,876, filed on Aug. 22, 1997.
(60) Provisional application No. 60/056,881, filed on Aug. 22, 1997.
(60) Provisional application No. 60/056,909, filed on Aug. 22, 1997.
(60) Provisional application No. 60/056,875, filed on Aug. 22, 1997.
(60) Provisional application No. 60/056,862, filed on Aug. 22, 1997.
(60) Provisional application No. 60/056,887, filed on Aug. 22, 1997.
(60) Provisional application No. 60/056,908, filed on Aug. 22, 1997.
(60) Provisional application No. 60/048,964, filed on Jun. 6, 1997.
(60) Provisional application No. 60/057,650, filed on Sep. 5, 1997.
(60) Provisional application No. 60/056,884, filed on Aug. 22, 1997.
(60) Provisional application No. 60/190,068, filed on Mar. 17, 2000.
(60) Provisional application No. 60/040,161, filed on Mar. 7, 1997.
(60) Provisional application No. 60/040,162, filed on Mar. 7, 1997.
(60) Provisional application No. 60/040,333, filed on Mar. 7, 1997.
(60) Provisional application No. 60/038,621, filed on Mar. 7, 1997.
(60) Provisional application No. 60/040,626, filed on Mar. 7, 1997.
(60) Provisional application No. 60/040,334, filed on Mar. 7, 1997.
(60) Provisional application No. 60/040,336, filed on Mar. 7, 1997.
(60) Provisional application No. 60/040,163, filed on Mar. 7, 1997.
(60) Provisional application No. 60/047,600, filed on May 23, 1997.
(60) Provisional application No. 60/047,615, filed on May 23, 1997.
(60) Provisional application No. 60/047,597, filed on May 23, 1997.
(60) Provisional application No. 60/047,502, filed on May 23, 1997.
(60) Provisional application No. 60/047,633, filed on May 23, 1997.
(60) Provisional application No. 60/047,583, filed on May 23, 1997.
(60) Provisional application No. 60/047,617, filed on May 23, 1997.
(60) Provisional application No. 60/047,618, filed on May 23, 1997.
(60) Provisional application No. 60/047,503, filed on May 23, 1997.
(60) Provisional application No. 60/047,592, filed on May 23, 1997.
(60) Provisional application No. 60/047,581, filed on May 23, 1997.
(60) Provisional application No. 60/047,584, filed on May 23, 1997.
(60) Provisional application No. 60/047,500, filed on May 23, 1997.
(60) Provisional application No. 60/047,587, filed on May 23, 1997.
(60) Provisional application No. 60/047,492, filed on May 23, 1997.
(60) Provisional application No. 60/047,598, filed on May 23, 1997.
(60) Provisional application No. 60/047,613, filed on May 23, 1997.
(60) Provisional application No. 60/047,582, filed on May 23, 1997.
(60) Provisional application No. 60/047,596, filed on May 23, 1997.
(60) Provisional application No. 60/047,612, filed on May 23, 1997.
(60) Provisional application No. 60/047,632, filed on May 23, 1997.
(60) Provisional application No. 60/047,601, filed on May 23, 1997.
(60) Provisional application No. 60/043,580, filed on Apr. 11, 1997.
(60) Provisional application No. 60/043,568, filed on Apr. 11, 1997.
(60) Provisional application No. 60/043,314, filed on Apr. 11, 1997.
(60) Provisional application No. 60/043,569, filed on Apr. 11, 1997.
(60) Provisional application No. 60/043,311, filed on Apr. 11, 1997.
(60) Provisional application No. 60/043,671, filed on Apr. 11, 1997.
(60) Provisional application No. 60/043,674, filed on Apr. 11, 1997.
(60) Provisional application No. 60/043,669, filed on Apr. 11, 1997.
(60) Provisional application No. 60/043,312, filed on Apr. 11, 1997.
(60) Provisional application No. 60/043,313, filed on Apr. 11, 1997.
(60) Provisional application No. 60/043,672, filed on Apr. 11, 1997.
(60) Provisional application No. 60/043,315, filed on Apr. 11, 1997.
(60) Provisional application No. 60/048,974, filed on Jun. 6, 1997.
(60) Provisional application No. 60/056,886, filed on Aug. 22, 1997.
(60) Provisional application No. 60/056,877, filed on Aug. 22, 1997.
(60) Provisional application No. 60/056,889, filed on Aug. 22, 1997.
(60) Provisional application No. 60/056,893, filed on Aug. 22, 1997.
(60) Provisional application No. 60/056,630, filed on Aug. 22, 1997.
(60) Provisional application No. 60/056,878, filed on Aug. 22, 1997.
(60) Provisional application No. 60/056,662, filed on Aug. 22, 1997.
(60) Provisional application No. 60/056,872, filed on Aug. 22, 1997.
(60) Provisional application No. 60/056,882, filed on Aug. 22, 1997.
(60) Provisional application No. 60/056,637, filed on Aug. 22, 1997.
(60) Provisional application No. 60/056,903, filed on Aug. 22, 1997.
(60) Provisional application No. 60/056,888, filed on Aug. 22, 1997.
(60) Provisional application No. 60/056,879, filed on Aug. 22, 1997.
(60) Provisional application No. 60/056,880, filed on Aug. 22, 1997.
(60) Provisional application No. 60/056,894, filed on Aug. 22, 1997.
(60) Provisional application No. 60/056,911, filed on Aug. 22, 1997.
(60) Provisional application No. 60/056,636, filed on Aug. 22, 1997.
(60) Provisional application No. 60/056,874, filed on Aug. 22, 1997.
(60) Provisional application No. 60/056,910, filed on Aug. 22, 1997.
(60) Provisional application No. 60/056,864, filed on Aug. 22, 1997.
(60) Provisional application No. 60/056,631, filed on Aug. 22, 1997.
(60) Provisional application No. 60/056,845, filed on Aug. 22, 1997.
(60) Provisional application No. 60/056,892, filed on Aug. 22, 1997.
(60) Provisional application No. 60/057,761, filed on Sep. 5, 1997.
(60) Provisional application No. 60/047,595, filed on May 23, 1997.
(60) Provisional application No. 60/047,599, filed on May 23, 1997.
(60) Provisional application No. 60/047,588, filed on May 23, 1997.
(60) Provisional application No. 60/047,585, filed on May 23, 1997.
(60) Provisional application No. 60/047,586, filed on May 23, 1997.
(60) Provisional application No. 60/047,590, filed on May 23, 1997.
(60) Provisional application No. 60/047,594, filed on May 23, 1997.
(60) Provisional application No. 60/047,589, filed on May 23, 1997.
(60) Provisional application No. 60/047,593, filed on May 23, 1997.
(60) Provisional application No. 60/047,614, filed on May 23, 1997.
(60) Provisional application No. 60/043,578, filed on Apr. 11, 1997.
(60) Provisional application No. 60/043,576, filed on Apr. 11, 1997.
(60) Provisional application No. 60/047,501, filed on May 23, 1997.
(60) Provisional application No. 60/043,670, filed on Apr. 11, 1997.
(60) Provisional application No. 60/056,632, filed on Aug. 22, 1997.
(60) Provisional application No. 60/056,664, filed on Aug. 22, 1997.
(60) Provisional application No. 60/056,876, filed on Aug. 22, 1997.
(60) Provisional application No. 60/056,881, filed on Aug. 22, 1997.
(60) Provisional application No. 60/056,909, filed on Aug. 22, 1997.
(60) Provisional application No. 60/056,875, filed on Aug. 22, 1997.
(60) Provisional application No. 60/056,862, filed on Aug. 22, 1997.
(60) Provisional application No. 60/056,887, filed on Aug. 22, 1997.
(60) Provisional application No. 60/056,908, filed on Aug. 22, 1997.
(60) Provisional application No. 60/048,964, filed on Jun. 6, 1997.
(60) Provisional application No. 60/057,650, filed on Sep. 5, 1997.
(60) Provisional application No. 60/056,884, filed on Aug. 22, 1997.
(60) Provisional application No. 60/057,669, filed on Sep. 5, 1997.
(60) Provisional application No. 60/049,610, filed on Jun. 13, 1997.
(60) Provisional application No. 60/061,060, filed on Oct. 2, 1997.
(60) Provisional application No. 60/051,926, filed on Jul. 8, 1997.
(60) Provisional application No. 60/052,874, filed on Jul. 16, 1997.
(60) Provisional application No. 60/058,785, filed on Sep. 12, 1997.
(60) Provisional application No. 60/055,724, filed on Aug. 18, 1997.
(60) Provisional application No. 60/265,583, filed on Feb. 2, 2001.
(60) Provisional application No. 60/265,583, filed on Feb. 2, 2001.
(60) Provisional application No. 60/265,583, filed on Feb. 2, 2001.
(60) Provisional application No. 60/265,583, filed on Feb. 2, 2001.
(60) Provisional application No. 60/265,583, filed on Feb. 2, 2001.
(60) Provisional application No. 60/040,762, filed on Mar. 14, 1997.
(60) Provisional application No. 60/040,710, filed on Mar. 14, 1997.
(60) Provisional application No. 60/050,934, filed on May 30, 1997.
(60) Provisional application No. 60/048,100, filed on May 30, 1997.
(60) Provisional application No. 60/048,357, filed on May 30, 1997.
(60) Provisional application No. 60/048,189, filed on May 30, 1997.
(60) Provisional application No. 60/057,765, filed on Sep. 5, 1997.
(60) Provisional application No. 60/048,970, filed on Jun. 6, 1997.
(60) Provisional application No. 60/068,368, filed on Dec. 19, 1997.
(60) Provisional application No. 60/041,277, filed on Mar. 21, 1997.
(60) Provisional application No. 60/042,344, filed on Mar. 21, 1997.
(60) Provisional application No. 60/041,276, filed on Mar. 21, 1997.
(60) Provisional application No. 60/041,281, filed on Mar. 21, 1997.
(60) Provisional application No. 60/048,094, filed on May 30, 1997.
(60) Provisional application No. 60/048,350, filed on May 30, 1997.
(60) Provisional application No. 60/048,188, filed on May 30, 1997.
(60) Provisional application No. 60/048,135, filed on May 30, 1997.
(60) Provisional application No. 60/050,937, filed on May 30, 1997.
(60) Provisional application No. 60/048,187, filed on May 30, 1997.
(60) Provisional application No. 60/048,099, filed on May 30, 1997.
(60) Provisional application No. 60/048,352, filed on May 30, 1997.
(60) Provisional application No. 60/048,186, filed on May 30, 1997.
(60) Provisional application No. 60/048,069, filed on May 30, 1997.
(60) Provisional application No. 60/048,095, filed on May 30, 1997.
(60) Provisional application No. 60/048,131, filed on May 30, 1997.
(60) Provisional application No. 60/048,096, filed on May 30, 1997.
(60) Provisional application No. 60/048,355, filed on May 30, 1997.
(60) Provisional application No. 60/048,160, filed on May 30, 1997.
(60) Provisional application No. 60/048,351, filed on May 30, 1997.
(60) Provisional application No. 60/048,154, filed on May 30, 1997.
(60) Provisional application No. 60/054,804, filed on Aug. 5, 1997.
(60) Provisional application No. 60/056,370, filed on Aug. 19, 1997.
(60) Provisional application No. 60/060,862, filed on Oct. 2, 1997.
(60) Provisional application No. 60/042,726, filed on Apr. 8, 1997.
(60) Provisional application No. 60/042,727, filed on Apr. 8, 1997.
(60) Provisional application No. 60/042,728, filed on Apr. 8, 1997.
(60) Provisional application No. 60/042,754, filed on Apr. 8, 1997.
(60) Provisional application No. 60/042,825, filed on Apr. 8, 1997.
(60) Provisional application No. 60/048,068, filed on May 30, 1997.
(60) Provisional application No. 60/048,070, filed on May 30, 1997.
(60) Provisional application No. 60/048,184, filed on May 30, 1997.
(60) Provisional application No. 60/042,726, filed on Apr. 8, 1997.
(60) Provisional application No. 60/042,727, filed on Apr. 8, 1997.
(60) Provisional application No. 60/042,728, filed on Apr. 8, 1997.
(60) Provisional application No. 60/042,754, filed on Apr. 8, 1997.
(60) Provisional application No. 60/042,825, filed on Apr. 8, 1997.
(60) Provisional application No. 60/048,068, filed on May 30, 1997.
(60) Provisional application No. 60/048,070, filed on May 30, 1997.
(60) Provisional application No. 60/048,184, filed on May 30, 1997.
(60) Provisional application No. 60/044,039, filed on May 30, 1997.
(60) Provisional application No. 60/048,093, filed on May 30, 1997.
(60) Provisional application No. 60/048,190, filed on May 30, 1997.
(60) Provisional application No. 60/050,935, filed on May 30, 1997.
(60) Provisional application No. 60/048,101, filed on May 30, 1997.
(60) Provisional application No. 60/048,356, filed on May 30, 1997.
(60) Provisional application No. 60/056,250, filed on Aug. 29, 1997.
(60) Provisional application No. 60/056,296, filed on Aug. 29, 1997.
(60) Provisional application No. 60/056,293, filed on Aug. 29, 1997.
(60) Provisional application No. 60/048,885, filed on Jun. 6, 1997.
(60) Provisional application No. 60/049,375, filed on Jun. 6, 1997.
(60) Provisional application No. 60/048,881, filed on Jun. 6, 1997.
(60) Provisional application No. 60/048,880, filed on Jun. 6, 1997.
(60) Provisional application No. 60/048,896, filed on Jun. 6, 1997.
(60) Provisional application No. 60/049,020, filed on Jun. 6, 1997.
(60) Provisional application No. 60/048,876, filed on Jun. 6, 1997.
(60) Provisional application No. 60/048,895, filed on Jun. 6, 1997.
(60) Provisional application No. 60/048,884, filed on Jun. 6, 1997.
(60) Provisional application No. 60/048,894, filed on Jun. 6, 1997.
(60) Provisional application No. 60/048,971, filed on Jun. 6, 1997.
(60) Provisional application No. 60/048,964, filed on Jun. 6, 1997.
(60) Provisional application No. 60/048,882, filed on Jun. 6, 1997.
(60) Provisional application No. 60/048,899, filed on Jun. 6, 1997.
(60) Provisional application No. 60/048,893, filed on Jun. 6, 1997.
(60) Provisional application No. 60/048,900, filed on Jun. 6, 1997.
(60) Provisional application No. 60/048,901, filed on Jun. 6, 1997.
(60) Provisional application No. 60/048,892, filed on Jun. 6, 1997.
(60) Provisional application No. 60/048,915, filed on Jun. 6, 1997.
(60) Provisional application No. 60/049,019, filed on Jun. 6, 1997.
(60) Provisional application No. 60/048,970, filed on Jun. 6, 1997.
(60) Provisional application No. 60/048,972, filed on Jun. 6, 1997.
(60) Provisional application No. 60/048,916, filed on Jun. 6, 1997.
(60) Provisional application No. 60/049,373, filed on Jun. 6, 1997.
(60) Provisional application No. 60/048,875, filed on Jun. 6, 1997.
(60) Provisional application No. 60/049,374, filed on Jun. 6, 1997.
(60) Provisional application No. 60/048,917, filed on Jun. 6, 1997.
(60) Provisional application No. 60/048,949, filed on Jun. 6, 1997.
(60) Provisional application No. 60/048,974, filed on Jun. 6, 1997.
(60) Provisional application No. 60/048,883, filed on Jun. 6, 1997.
(60) Provisional application No. 60/048,897, filed on Jun. 6, 1997.
(60) Provisional application No. 60/048,898, filed on Jun. 6, 1997.
(60) Provisional application No. 60/048,962, filed on Jun. 6, 1997.
(60) Provisional application No. 60/048,963, filed on Jun. 6, 1997.
(60) Provisional application No. 60/048,877, filed on Jun. 6, 1997.
(60) Provisional application No. 60/048,878, filed on Jun. 6, 1997.
(60) Provisional application No. 60/057,645, filed on Sep. 5, 1997.
(60) Provisional application No. 60/057,642, filed on Sep. 5, 1997.
(60) Provisional application No. 60/057,668, filed on Sep. 5, 1997.
(60) Provisional application No. 60/057,635, filed on Sep. 5, 1997.
(60) Provisional application No. 60/057,627, filed on Sep. 5, 1997.
(60) Provisional application No. 60/057,667, filed on Sep. 5, 1997.
(60) Provisional application No. 60/057,666, filed on Sep. 5, 1997.
(60) Provisional application No. 60/057,764, filed on Sep. 5, 1997.
(60) Provisional application No. 60/057,643, filed on Sep. 5, 1997.
(60) Provisional application No. 60/057,769, filed on Sep. 5, 1997.
(60) Provisional application No. 60/057,763, filed on Sep. 5, 1997.
(60) Provisional application No. 60/057,650, filed on Sep. 5, 1997.
(60) Provisional application No. 60/057,584, filed on Sep. 5, 1997.
(60) Provisional application No. 60/057,647, filed on Sep. 5, 1997.
(60) Provisional application No. 60/057,661, filed on Sep. 5, 1997.
(60) Provisional application No. 60/057,662, filed on Sep. 5, 1997.
(60) Provisional application No. 60/057,646, filed on Sep. 5, 1997.
(60) Provisional application No. 60/057,654, filed on Sep. 5, 1997.
(60) Provisional application No. 60/057,651, filed on Sep. 5, 1997.
(60) Provisional application No. 60/057,644, filed on Sep. 5, 1997.
(60) Provisional application No. 60/057,765, filed on Sep. 5, 1997.
(60) Provisional application No. 60/057,762, filed on Sep. 5, 1997.
(60) Provisional application No. 60/057,775, filed on Sep. 5, 1997.
(60) Provisional application No. 60/057,648, filed on Sep. 5, 1997.
(60) Provisional application No. 60/057,774, filed on Sep. 5, 1997.
(60) Provisional application No. 60/057,649, filed on Sep. 5, 1997.
(60) Provisional application No. 60/057,770, filed on Sep. 5, 1997.
(60) Provisional application No. 60/057,771, filed on Sep. 5, 1997.
(60) Provisional application No. 60/057,761, filed on Sep. 5, 1997.
(60) Provisional application No. 60/057,760, filed on Sep. 5, 1997.
(60) Provisional application No. 60/057,776, filed on Sep. 5, 1997.
(60) Provisional application No. 60/057,778, filed on Sep. 5, 1997.
(60) Provisional application No. 60/057,629, filed on Sep. 5, 1997.
(60) Provisional application No. 60/057,628, filed on Sep. 5, 1997.

(51) Int. Cl. C12Q 1/68; C07H 21/04; C12P 21/06; C12N 9/00; C07K 14/47

(52) U.S. Cl. 435/6; 435/69.1; 435/183; 435/320.1; 435/325; 530/350; 536/23.2

(57) ABSTRACT

The present invention relates to human secreted polypeptides, and isolated nucleic acid molecules encoding said polypeptides, useful for diagnosing and treating allergic and asthmatic disorders. Antibodies that bind these polypeptides are also encompassed by the present invention. Also encompassed by the invention are vectors, host cells, and recombinant and synthetic methods for producing said polynucleotides, polypeptides, and/or antibodies. The invention further encompasses screening methods for identifying agonists and antagonists of polynucleotides and polypeptides of the invention. The present invention further encompasses methods and compositions for inhibiting or enhancing the production and function of the polypeptides of the present invention.

### RELATED APPLICATIONS

[0001] This application is a continuation-in-part of U.S. application Ser. No. 10/664,359, filed Sep. 20, 2003, which is a continuation-in-part of PCT/US02/08279, filed Mar. 19, 2002, which in turn claims benefit of the following:

| Application:: | Continuity Type:: | Parent Application:: | Parent Filing Date:: |
|---|---|---|---|
| PCT/US02/08279 | Continuation-in-part of | 10/100,683 | Mar. 19, 2002 |
| 10/100,683 | Non-provisional of | 60/277,340 | Mar. 21, 2001 |
| 10/100,683 | Non-provisional of | 60/306,171 | Jul. 19, 2001 |
| 10/100,683 | Non-provisional of | 60/331,287 | Nov. 13, 2001 |
| 10/100,683 | Continuation-in-part of | 09/981,876 | Oct. 19, 2001 |
| 09/981,876 | Divisional of | 09/621,011 | Jul. 20, 2000 |
| 09/621,011 | Continuation of | 09/148,545 | Sep. 04, 1998 |
| 09/148,545 | Continuation-in-part of | PCT/US98/04482 | Mar. 06, 1998 |
| 10/100,683 | Continuation-in-part of | 09/621,011 | Jul. 20, 2000 |
| 09/621,011 | Continuation of | 09/148,545 | Sep. 04, 1998 |
| 09/148,545 | Continuation-in-part of | PCT/US98/04482 | Mar. 06, 1998 |
| 10/100,683 | Continuation-in-part of | 09/148,545 | Sep. 04, 1998 |
| 09/148,545 | Continuation-in-part of | PCT/US98/04482 | Mar. 06, 1998 |
| 10/100,683 | Continuation-in-part of | PCT/US98/04482 | Mar. 06, 1998 |
| PCT/US98/04482 | Non-provisional of | 60/040,162 | Mar. 07, 1997 |
| PCT/US98/04482 | Non-provisional of | 60/040,333 | Mar. 07, 1997 |
| PCT/US98/04482 | Non-provisional of | 60/038,621 | Mar. 07, 1997 |
| PCT/US98/04482 | Non-provisional of | 60/040,161 | Mar. 07, 1997 |
| PCT/US98/04482 | Non-provisional of | 60/040,626 | Mar. 07, 1997 |
| PCT/US98/04482 | Non-provisional of | 60/040,334 | Mar. 07, 1997 |
| PCT/US98/04482 | Non-provisional of | 60/040,336 | Mar. 07, 1997 |
| PCT/US98/04482 | Non-provisional of | 60/040,163 | Mar. 07, 1997 |
| PCT/US98/04482 | Non-provisional of | 60/047,615 | May 23, 1997 |
| PCT/US98/04482 | Non-provisional of | 60/047,600 | May 23, 1997 |
| PCT/US98/04482 | Non-provisional of | 60/047,597 | May 23, 1997 |
| PCT/US98/04482 | Non-provisional of | 60/047,502 | May 23, 1997 |
| PCT/US98/04482 | Non-provisional of | 60/047,633 | May 23, 1997 |
| PCT/US98/04482 | Non-provisional of | 60/047,583 | May 23, 1997 |
| PCT/US98/04482 | Non-provisional of | 60/047,617 | May 23, 1997 |
| PCT/US98/04482 | Non-provisional of | 60/047,618 | May 23, 1997 |
| PCT/US98/04482 | Non-provisional of | 60/047,503 | May 23, 1997 |
| PCT/US98/04482 | Non-provisional of | 60/047,592 | May 23, 1997 |
| PCT/US98/04482 | Non-provisional of | 60/047,581 | May 23, 1997 |
| PCT/US98/04482 | Non-provisional of | 60/047,584 | May 23, 1997 |
| PCT/US98/04482 | Non-provisional of | 60/047,500 | May 23, 1997 |
| PCT/US98/04482 | Non-provisional of | 60/047,587 | May 23, 1997 |
| PCT/US98/04482 | Non-provisional of | 60/047,492 | May 23, 1997 |
| PCT/US98/04482 | Non-provisional of | 60/047,598 | May 23, 1997 |
| PCT/US98/04482 | Non-provisional of | 60/047,613 | May 23, 1997 |
| PCT/US98/04482 | Non-provisional of | 60/047,582 | May 23, 1997 |
| PCT/US98/04482 | Non-provisional of | 60/047,596 | May 23, 1997 |
| PCT/US98/04482 | Non-provisional of | 60/047,612 | May 23, 1997 |
| PCT/US98/04482 | Non-provisional of | 60/047,632 | May 23, 1997 |
| PCT/US98/04482 | Non-provisional of | 60/047,601 | May 23, 1997 |
| PCT/US98/04482 | Non-provisional of | 60/043,580 | Apr. 11, 1997 |
| PCT/US98/04482 | Non-provisional of | 60/043,568 | Apr. 11, 1997 |
| PCT/US98/04482 | Non-provisional of | 60/043,314 | Apr. 11, 1997 |
| PCT/US98/04482 | Non-provisional of | 60/043,569 | Apr. 11, 1997 |
| PCT/US98/04482 | Non-provisional of | 60/043,311 | Apr. 11, 1997 |
| PCT/US98/04482 | Non-provisional of | 60/043,671 | Apr. 11, 1997 |
| PCT/US98/04482 | Non-provisional of | 60/043,674 | Apr. 11, 1997 |
| PCT/US98/04482 | Non-provisional of | 60/043,669 | Apr. 11, 1997 |
| PCT/US98/04482 | Non-provisional of | 60/043,312 | Apr. 11, 1997 |
| PCT/US98/04482 | Non-provisional of | 60/043,313 | Apr. 11, 1997 |
| PCT/US98/04482 | Non-provisional of | 60/043,672 | Apr. 11, 1997 |
| PCT/US98/04482 | Non-provisional of | 60/043,315 | Apr. 11, 1997 |
| PCT/US98/04482 | Non-provisional of | 60/048,974 | Jun. 06, 1997 |
| PCT/US98/04482 | Non-provisional of | 60/056,886 | Aug. 22, 1997 |
| PCT/US98/04482 | Non-provisional of | 60/056,877 | Aug. 22, 1997 |
| PCT/US98/04482 | Non-provisional of | 60/056,889 | Aug. 22, 1997 |
| PCT/US98/04482 | Non-provisional of | 60/056,893 | Aug. 22, 1997 |
| PCT/US98/04482 | Non-provisional of | 60/056,630 | Aug. 22, 1997 |
| PCT/US98/04482 | Non-provisional of | 60/056,878 | Aug. 22, 1997 |
| PCT/US98/04482 | Non-provisional of | 60/056,662 | Aug. 22, 1997 |
| PCT/US98/04482 | Non-provisional of | 60/056,872 | Aug. 22, 1997 |
| PCT/US98/04482 | Non-provisional of | 60/056,882 | Aug. 22, 1997 |
| PCT/US98/04482 | Non-provisional of | 60/056,637 | Aug. 22, 1997 |
| PCT/US98/04482 | Non-provisional of | 60/056,903 | Aug. 22, 1997 |
| PCT/US98/04482 | Non-provisional of | 60/056,888 | Aug. 22, 1997 |
| PCT/US98/04482 | Non-provisional of | 60/056,879 | Aug. 22, 1997 |
| PCT/US98/04482 | Non-provisional of | 60/056,880 | Aug. 22, 1997 |
| PCT/US98/04482 | Non-provisional of | 60/056,894 | Aug. 22, 1997 |
| PCT/US98/04482 | Non-provisional of | 60/056,911 | Aug. 22, 1997 |
| PCT/US98/04482 | Non-provisional of | 60/056,636 | Aug. 22, 1997 |
| PCT/US98/04482 | Non-provisional of | 60/056,874 | Aug. 22, 1997 |
| PCT/US98/04482 | Non-provisional of | 60/056,910 | Aug. 22, 1997 |
| PCT/US98/04482 | Non-provisional of | 60/056,864 | Aug. 22, 1997 |
| PCT/US98/04482 | Non-provisional of | 60/056,631 | Aug. 22, 1997 |
| PCT/US98/04482 | Non-provisional of | 60/056,845 | Aug. 22, 1997 |
| PCT/US98/04482 | Non-provisional of | 60/056,892 | Aug. 22, 1997 |
| PCT/US98/04482 | Non-provisional of | 60/047,595 | May 23, 1997 |
| PCT/US98/04482 | Non-provisional of | 60/057,761 | Sep. 05, 1997 |
| PCT/US98/04482 | Non-provisional of | 60/047,599 | May 23, 1997 |
| PCT/US98/04482 | Non-provisional of | 60/047,588 | May 23, 1997 |
| PCT/US98/04482 | Non-provisional of | 60/047,585 | May 23, 1997 |
| PCT/US98/04482 | Non-provisional of | 60/047,586 | May 23, 1997 |
| PCT/US98/04482 | Non-provisional of | 60/047,590 | May 23, 1997 |
| PCT/US98/04482 | Non-provisional of | 60/047,594 | May 23, 1997 |
| PCT/US98/04482 | Non-provisional of | 60/047,589 | May 23, 1997 |
| PCT/US98/04482 | Non-provisional of | 60/047,593 | May 23, 1997 |
| PCT/US98/04482 | Non-provisional of | 60/047,614 | May 23, 1997 |
| PCT/US98/04482 | Non-provisional of | 60/043,578 | Apr. 11, 1997 |
| PCT/US98/04482 | Non-provisional of | 60/043,576 | Apr. 11, 1997 |
| PCT/US98/04482 | Non-provisional of | 60/047,501 | May 23, 1997 |
| PCT/US98/04482 | Non-provisional of | 60/043,670 | Apr. 11, 1997 |
| PCT/US98/04482 | Non-provisional of | 60/056,632 | Aug. 22, 1997 |
| PCT/US98/04482 | Non-provisional of | 60/056,664 | Aug. 22, 1997 |
| PCT/US98/04482 | Non-provisional of | 60/056,876 | Aug. 22, 1997 |
| PCT/US98/04482 | Non-provisional of | 60/056,881 | Aug. 22, 1997 |
| PCT/US98/04482 | Non-provisional of | 60/056,909 | Aug. 22, 1997 |
| PCT/US98/04482 | Non-provisional of | 60/056,875 | Aug. 22, 1997 |
| PCT/US98/04482 | Non-provisional of | 60/056,862 | Aug. 22, 1997 |
| PCT/US98/04482 | Non-provisional of | 60/056,887 | Aug. 22, 1997 |
| PCT/US98/04482 | Non-provisional of | 60/056,908 | Aug. 22, 1997 |
| PCT/US98/04482 | Non-provisional of | 60/048,964 | Jun. 06, 1997 |
| PCT/US98/04482 | Non-provisional of | 60/057,650 | Sep. 05, 1997 |
| PCT/US98/04482 | Non-provisional of | 60/056,884 | Aug. 22, 1997 |
| 10/100,683 | Continuation-in-part of | 09/882,171 | Jun. 18, 2001 |
| 09/882,171 | Non-provisional of | 60/190,068 | Mar. 17, 2000 |
| 09/882,171 | Continuation of | 09/809,391 | Mar. 16, 2001 |
| 09/809,391 | Continuation-in-part of | 09/149,476 | Sep. 08, 1998 |
| 09/149,476 | Continuation-in-part of | PCT/US98/04493 | Mar. 06, 1998 |
| 10/100,683 | Continuation-in-part of | 09/809,391 | Mar. 16, 2001 |
| 09/809,391 | Non-provisional of | 60/190,068 | Mar. 17, 2000 |
| 09/809,391 | Continuation-in-part of | 09/149,476 | Sep. 08, 1998 |
| 09/149,476 | Continuation-in-part of | PCT/US98/04493 | Mar. 06, 1998 |
| 10/100,683 | Continuation-in-part of | 09/149,476 | Sep. 08, 1998 |
| 09/149,476 | Continuation-in-part of | PCT/US98/04493 | Mar. 06, 1998 |
| 10/100,683 | Continuation-in-part of | PCT/US98/04493 | Mar. 06, 1998 |
| PCT/US98/04493 | Non-provisional of | 60/040,161 | Mar. 07, 1997 |
| PCT/US98/04493 | Non-provisional of | 60/040,162 | Mar. 07, 1997 |
| PCT/US98/04493 | Non-provisional of | 60/040,333 | Mar. 07, 1997 |
| PCT/US98/04493 | Non-provisional of | 60/038,621 | Mar. 07, 1997 |
| PCT/US98/04493 | Non-provisional of | 60/040,626 | Mar. 07, 1997 |
| PCT/US98/04493 | Non-provisional of | 60/040,334 | Mar. 07, 1997 |
| PCT/US98/04493 | Non-provisional of | 60/040,336 | Mar. 07, 1997 |
| PCT/US98/04493 | Non-provisional of | 60/040,163 | Mar. 07, 1997 |
| PCT/US98/04493 | Non-provisional of | 60/047,600 | May 23, 1997 |
| PCT/US98/04493 | Non-provisional of | 60/047,615 | May 23, 1997 |
| PCT/US98/04493 | Non-provisional of | 60/047,597 | May 23, 1997 |
| PCT/US98/04493 | Non-provisional of | 60/047,502 | May 23, 1997 |
| PCT/US98/04493 | Non-provisional of | 60/047,633 | May 23, 1997 |
| PCT/US98/04493 | Non-provisional of | 60/047,583 | May 23, 1997 |
| PCT/US98/04493 | Non-provisional of | 60/047,617 | May 23, 1997 |
| PCT/US98/04493 | Non-provisional of | 60/047,618 | May 23, 1997 |
| PCT/US98/04493 | Non-provisional of | 60/047,503 | May 23, 1997 |
| PCT/US98/04493 | Non-provisional of | 60/047,592 | May 23, 1997 |
| PCT/US98/04493 | Non-provisional of | 60/047,581 | May 23, 1997 |
| PCT/US98/04493 | Non-provisional of | 60/047,584 | May 23, 1997 |
| PCT/US98/04493 | Non-provisional of | 60/047,500 | May 23, 1997 |
| PCT/US98/04493 | Non-provisional of | 60/047,587 | May 23, 1997 |
| PCT/US98/04493 | Non-provisional of | 60/047,492 | May 23, 1997 |
| PCT/US98/04493 | Non-provisional of | 60/047,598 | May 23, 1997 |
| PCT/US98/04493 | Non-provisional of | 60/047,613 | May 23, 1997 |
| PCT/US98/04493 | Non-provisional of | 60/047,582 | May 23, 1997 |
| PCT/US98/04493 | Non-provisional of | 60/047,596 | May 23, 1997 |
| PCT/US98/04493 | Non-provisional of | 60/047,612 | May 23, 1997 |
| PCT/US98/04493 | Non-provisional of | 60/047,632 | May 23, 1997 |
| PCT/US98/04493 | Non-provisional of | 60/047,601 | May 23, 1997 |
| PCT/US98/04493 | Non-provisional of | 60/043,580 | Apr. 11, 1997 |
| PCT/US98/04493 | Non-provisional of | 60/043,568 | Apr. 11, 1997 |
| PCT/US98/04493 | Non-provisional of | 60/043,314 | Apr. 11, 1997 |
| PCT/US98/04493 | Non-provisional of | 60/043,569 | Apr. 11, 1997 |
| PCT/US98/04493 | Non-provisional of | 60/043,311 | Apr. 11, 1997 |
| PCT/US98/04493 | Non-provisional of | 60/043,671 | Apr. 11, 1997 |
| PCT/US98/04493 | Non-provisional of | 60/043,674 | Apr. 11, 1997 |
| PCT/US98/04493 | Non-provisional of | 60/043,669 | Apr. 11, 1997 |
| PCT/US98/04493 | Non-provisional of | 60/043,312 | Apr. 11, 1997 |
| PCT/US98/04493 | Non-provisional of | 60/043,313 | Apr. 11, 1997 |
| PCT/US98/04493 | Non-provisional of | 60/043,672 | Apr. 11, 1997 |
| PCT/US98/04493 | Non-provisional of | 60/043,315 | Apr. 11, 1997 |
| PCT/US98/04493 | Non-provisional of | 60/048,974 | Jun. 06, 1997 |
| PCT/US98/04493 | Non-provisional of | 60/056,886 | Aug. 22, 1997 |
| PCT/US98/04493 | Non-provisional of | 60/056,877 | Aug. 22, 1997 |
| PCT/US98/04493 | Non-provisional of | 60/056,889 | Aug. 22, 1997 |
| PCT/US98/04493 | Non-provisional of | 60/056,893 | Aug. 22, 1997 |
| PCT/US98/04493 | Non-provisional of | 60/056,630 | Aug. 22, 1997 |
| PCT/US98/04493 | Non-provisional of | 60/056,878 | Aug. 22, 1997 |
| PCT/US98/04493 | Non-provisional of | 60/056,662 | Aug. 22, 1997 |
| PCT/US98/04493 | Non-provisional of | 60/056,872 | Aug. 22, 1997 |
| PCT/US98/04493 | Non-provisional of | 60/056,882 | Aug. 22, 1997 |
| PCT/US98/04493 | Non-provisional of | 60/056,637 | Aug. 22, 1997 |
| PCT/US98/04493 | Non-provisional of | 60/056,903 | Aug. 22, 1997 |
| PCT/US98/04493 | Non-provisional of | 60/056,888 | Aug. 22, 1997 |
| PCT/US98/04493 | Non-provisional of | 60/056,879 | Aug. 22, 1997 |
| PCT/US98/04493 | Non-provisional of | 60/056,880 | Aug. 22, 1997 |
| PCT/US98/04493 | Non-provisional of | 60/056,894 | Aug. 22, 1997 |
| PCT/US98/04493 | Non-provisional of | 60/056,911 | Aug. 22, 1997 |
| PCT/US98/04493 | Non-provisional of | 60/056,636 | Aug. 22, 1997 |
| PCT/US98/04493 | Non-provisional of | 60/056,874 | Aug. 22, 1997 |
| PCT/US98/04493 | Non-provisional of | 60/056,910 | Aug. 22, 1997 |
| PCT/US98/04493 | Non-provisional of | 60/056,864 | Aug. 22, 1997 |
| PCT/US98/04493 | Non-provisional of | 60/056,631 | Aug. 22, 1997 |
| PCT/US98/04493 | Non-provisional of | 60/056,845 | Aug. 22, 1997 |
| PCT/US98/04493 | Non-provisional of | 60/056,892 | Aug. 22, 1997 |
| PCT/US98/04493 | Non-provisional of | 60/057,761 | Sep. 05, 1997 |
| PCT/US98/04493 | Non-provisional of | 60/047,595 | May 23, 1997 |
| PCT/US98/04493 | Non-provisional of | 60/047,599 | May 23, 1997 |
| PCT/US98/04493 | Non-provisional of | 60/047,588 | May 23, 1997 |
| PCT/US98/04493 | Non-provisional of | 60/047,585 | May 23, 1997 |
| PCT/US98/04493 | Non-provisional of | 60/047,586 | May 23, 1997 |
| PCT/US98/04493 | Non-provisional of | 60/047,590 | May 23, 1997 |
| PCT/US98/04493 | Non-provisional of | 60/047,594 | May 23, 1997 |
| PCT/US98/04493 | Non-provisional of | 60/047,589 | May 23, 1997 |
| PCT/US98/04493 | Non-provisional of | 60/047,593 | May 23, 1997 |
| PCT/US98/04493 | Non-provisional of | 60/047,614 | May 23, 1997 |
| PCT/US98/04493 | Non-provisional of | 60/043,578 | Apr. 11, 1997 |
| PCT/US98/04493 | Non-provisional of | 60/043,576 | Apr. 11, 1997 |
| PCT/US98/04493 | Non-provisional of | 60/047,501 | May 23, 1997 |
| PCT/US98/04493 | Non-provisional of | 60/043,670 | Apr. 11, 1997 |
| PCT/US98/04493 | Non-provisional of | 60/056,632 | Aug. 22, 1997 |
| PCT/US98/04493 | Non-provisional of | 60/056,664 | Aug. 22, 1997 |
| PCT/US98/04493 | Non-provisional of | 60/056,876 | Aug. 22, 1997 |
| PCT/US98/04493 | Non-provisional of | 60/056,881 | Aug. 22, 1997 |
| PCT/US98/04493 | Non-provisional of | 60/056,909 | Aug. 22, 1997 |
| PCT/US98/04493 | Non-provisional of | 60/056,875 | Aug. 22, 1997 |
| PCT/US98/04493 | Non-provisional of | 60/056,862 | Aug. 22, 1997 |
| PCT/US98/04493 | Non-provisional of | 60/056,887 | Aug. 22, 1997 |
| PCT/US98/04493 | Non-provisional of | 60/056,908 | Aug. 22, 1997 |
| PCT/US98/04493 | Non-provisional of | 60/048,964 | Jun. 06, 1997 |
| PCT/US98/04493 | Non-provisional of | 60/057,650 | Sep. 05, 1997 |
| PCT/US98/04493 | Non-provisional of | 60/056,884 | Aug. 22, 1997 |
| PCT/US98/04493 | Non-provisional of | 60/057,669 | Sep. 05, 1997 |
| PCT/US98/04493 | Non-provisional of | 60/049,610 | Jun. 13, 1997 |
| PCT/US98/04493 | Non-provisional of | 60/061,060 | Oct. 02, 1997 |
| PCT/US98/04493 | Non-provisional of | 60/051,926 | Jul. 08, 1997 |
| PCT/US98/04493 | Non-provisional of | 60/052,874 | Jul. 16, 1997 |
| PCT/US98/04493 | Non-provisional of | 60/058,785 | Sep. 12, 1997 |
| PCT/US98/04493 | Non-provisional of | 60/055,724 | Aug. 18, 1997 |
| 10/100,683 | Continuation-in-part of | 10/058,993 | Jan. 30, 2002 |
| 10/058,993 | Non-provisional of | 60/265,583 | Feb. 02, 2001 |
| 10/058,993 | Continuation-in-part of | 09/852,659 | May 11, 2001 |
| 09/852,659 | Continuation-in-part of | 09/152,060 | Sep. 11, 1998 |
| 09/152,060 | Continuation-in-part of | PCT/US98/04858 | Mar. 12, 1998 |
| 10/058,993 | Continuation-in-part of | 09/853,161 | May 11, 2001 |
| 09/853,161 | Continuation-in-part of | 09/152,060 | Sep. 11, 1998 |
| 09/152,060 | Continuation-in-part of | PCT/US98/04858 | Mar. 12, 1998 |
| 10/058,993 | Continuation-in-part of | 09/852,797 | May 11, 2001 |
| 09/852,797 | Continuation-in-part of | 09/152,060 | Sep. 11, 1998 |
| 09/152,060 | Continuation-in-part of | PCT/US98/04858 | Mar. 12, 1998 |
| 10/100,683 | Continuation-in-part of | 09/852,659 | May 11, 2001 |
| 09/852,659 | Non-provisional of | 60/265,583 | Feb. 02, 2001 |
| 09/852,659 | Continuation-in-part of | 09/152,060 | Sep. 11, 1998 |
| 09/152,060 | Continuation-in-part of | PCT/US98/04858 | Mar. 12, 1998 |
| 10/100,683 | Continuation-in-part of | 09/853,161 | May 11, 2001 |
| 09/853,161 | Non-provisional of | 60/265,583 | Feb. 02, 2001 |
| 09/853,161 | Continuation-in-part of | 09/152,060 | Sep. 11, 1998 |
| 09/152,060 | Continuation-in-part of | PCT/US98/04858 | Mar. 12, 1998 |
| 10/100,683 | Continuation-in-part of | 09/852,797 | May 11, 2001 |
| 09/852,797 | Non-provisional of | 60/265,583 | Feb. 02, 2001 |
| 09/852,797 | Continuation-in-part of | 09/152,060 | Sep. 11, 1998 |
| 09/152,060 | Continuation-in-part of | PCT/US98/04858 | Mar. 12, 1998 |
| 10/100,683 | Continuation-in-part of | 09/152,060 | Sep. 11, 1998 |
| 09/152,060 | Continuation-in-part of | PCT/US98/04858 | Mar. 12, 1998 |
| 10/100,683 | Continuation-in-part of | PCT/US98/04858 | Mar. 12, 1998 |
| PCT/US98/04858 | Non-provisional of | 60/040,762 | Mar. 14, 1997 |
| PCT/US98/04858 | Non-provisional of | 60/040,710 | Mar. 14, 1997 |
| PCT/US98/04858 | Non-provisional of | 60/050,934 | May 30, 1997 |
| PCT/US98/04858 | Non-provisional of | 60/048,100 | May 30, 1997 |
| PCT/US98/04858 | Non-provisional of | 60/048,357 | May 30, 1997 |
| PCT/US98/04858 | Non-provisional of | 60/048,189 | May 30, 1997 |
| PCT/US98/04858 | Non-provisional of | 60/057,765 | Sep. 05, 1997 |
| PCT/US98/04858 | Non-provisional of | 60/048,970 | Jun. 06, 1997 |
| PCT/US98/04858 | Non-provisional of | 60/068,368 | Dec. 19, 1997 |
| 10/100,683 | Continuation-in-part of | 10/059,395 | Jan. 31, 2002 |
| 10/059,395 | Divisional of | 09/966,262 | Oct. 01, 2001 |
| 09/966,262 | Continuation of | 09/154,707 | Sep. 17, 1998 |
| 09/154,707 | Continuation-in-part of | PCT/US98/05311 | Mar. 19, 1998 |
| 10/100,683 | Continuation-in-part of | 09/984,245 | Oct. 29, 2001 |
| 09/984,245 | Divisional of | 09/154,707 | Sep. 17, 1998 |
| 09/154,707 | Continuation-in-part of | PCT/US98/05311 | Mar. 19, 1998 |
| 10/100,683 | Continuation-in-part of | 09/983,966 | Oct. 26, 2001 |
| 09/983,966 | Divisional of | 09/154,707 | Sep. 17, 1998 |
| 09/154,707 | Continuation-in-part of | PCT/US98/05311 | Mar. 19, 1998 |
| 10/100,683 | Continuation-in-part of | 09/966,262 | Oct. 01, 2001 |
| 09/966,262 | Continuation of of | 09/154,707 | Sep. 17, 1998 |
| 09/154,707 | Continuation-in-part of | PCT/US98/05311 | Mar. 19, 1998 |
| 10/100,683 | Continuation-in-part of | 09/154,707 | Sep. 17, 1998 |
| 09/154,707 | Continuation-in-part of | PCT/US98/05311 | Mar. 19, 1998 |
| 10/100,683 | Continuation-in-part of | PCT/US98/05311 | Mar. 03, 1998 |
| PCT/US98/05311 | Non-provisional of | 60/041,277 | Mar. 21, 1997 |
| PCT/US98/05311 | Non-provisional of | 60/042,344 | Mar. 21, 1997 |
| PCT/US98/05311 | Non-provisional of | 60/041,276 | Mar. 21, 1997 |
| PCT/US98/05311 | Non-provisional of | 60/041,281 | Mar. 21, 1997 |
| PCT/US98/05311 | Non-provisional of | 60/048,094 | May 30, 1997 |
| PCT/US98/05311 | Non-provisional of | 60/048,350 | May 30, 1997 |
| PCT/US98/05311 | Non-provisional of | 60/048,188 | May 30, 1997 |
| PCT/US98/05311 | Non-provisional of | 60/048,135 | May 30, 1997 |
| PCT/US98/05311 | Non-provisional of | 60/050,937 | May 30, 1997 |
| PCT/US98/05311 | Non-provisional of | 60/048,187 | May 30, 1997 |
| PCT/US98/05311 | Non-provisional of | 60/048,099 | May 30, 1997 |
| PCT/US98/05311 | Non-provisional of | 60/048,352 | May 30, 1997 |
| PCT/US98/05311 | Non-provisional of | 60/048,186 | May 30, 1997 |
| PCT/US98/05311 | Non-provisional of | 60/048,069 | May 30, 1997 |
| PCT/US98/05311 | Non-provisional of | 60/048,095 | May 30, 1997 |
| PCT/US98/05311 | Non-provisional of | 60/048,131 | May 30, 1997 |
| PCT/US98/05311 | Non-provisional of | 60/048,096 | May 30, 1997 |
| PCT/US98/05311 | Non-provisional of | 60/048,355 | May 30, 1997 |
| PCT/US98/05311 | Non-provisional of | 60/048,160 | May 30, 1997 |
| PCT/US98/05311 | Non-provisional of | 60/048,351 | May 30, 1997 |
| PCT/US98/05311 | Non-provisional of | 60/048,154 | May 30, 1997 |
| PCT/US98/05311 | Non-provisional of | 60/054,804 | Aug. 05, 1997 |
| PCT/US98/05311 | Non-provisional of | 60/056,370 | Aug. 19, 1997 |
| PCT/US98/05311 | Non-provisional of | 60/060,862 | Oct. 02, 1997 |
| 10/100,683 | Continuation-in-part of | 09/814,122 | Mar. 22, 2001 |
| 09/814,122 | Continuation of | 09/577,145 | May 24, 2000 |
| 09/577,145 | Continuation of | 09/166,780 | Oct. 06, 1998 |
| 09/166,780 | Continuation-in-part of | PCT/US98/06801 | Apr. 07, 1998 |
| 10/100,683 | Continuation-in-part of | PCT/US98/06801 | Apr. 07, 1998 |
| PCT/US98/06801 | Non-provisional of | 60/042,726 | Apr. 08, 1997 |
| PCT/US98/06801 | Non-provisional of | 60/042,727 | Apr. 08, 1997 |
| PCT/US98/06801 | Non-provisional of | 60/042,728 | Apr. 08, 1997 |
| PCT/US98/06801 | Non-provisional of | 60/042,754 | Apr. 08, 1997 |
| PCT/US98/06801 | Non-provisional of | 60/042,825 | Apr. 08, 1997 |
| PCT/US98/06801 | Non-provisional of | 60/048,068 | May 30, 1997 |
| PCT/US98/06801 | Non-provisional of | 60/048,070 | May 30, 1997 |
| PCT/US98/06801 | Non-provisional of | 60/048,184 | May 30, 1997 |
| 10/100,683 | Continuation-in-part of | PCT/US98/06801 | Apr. 07, 1997 |
| PCT/US98/06801 | Non-provisional of | 60/042,726 | Apr. 08, 1997 |
| PCT/US98/06801 | Non-provisional of | 60/042,727 | Apr. 08, 1997 |
| PCT/US98/06801 | Non-provisional of | 60/042,728 | Apr. 08, 1997 |
| PCT/US98/06801 | Non-provisional of | 60/042,754 | Apr. 08, 1997 |
| PCT/US98/06801 | Non-provisional of | 60/042,825 | Apr. 08, 1997 |
| PCT/US98/06801 | Non-provisional of | 60/048,068 | May 30, 1997 |
| PCT/US98/06801 | Non-provisional of | 60/048,070 | May 30, 1997 |
| PCT/US98/06801 | Non-provisional of | 60/048,184 | May 30, 1997 |
| 10/100,683 | Continuation-in-part of | PCT/US98/10868 | May 28, 1998 |
| PCT/US98/10868 | Non-provisional of | 60/044,039 | May 30, 1997 |
| PCT/US98/10868 | Non-provisional of | 60/048,093 | May 30, 1997 |
| PCT/US98/10868 | Non-provisional of | 60/048,190 | May 30, 1997 |
| PCT/US98/10868 | Non-provisional of | 60/050,935 | May 30, 1997 |
| PCT/US98/10868 | Non-provisional of | 60/048,101 | May 30, 1997 |
| PCT/US98/10868 | Non-provisional of | 60/048,356 | May 30, 1997 |
| PCT/US98/10868 | Non-provisional of | 60/056,250 | Aug. 29, 1997 |
| PCT/US98/10868 | Non-provisional of | 60/056,296 | Aug. 29, 1997 |
| PCT/US98/10868 | Non-provisional of | 60/056,293 | Aug. 29, 1997 |
| 10/100,683 | Continuation-in-part of | PCT/US98/11422 | Jun. 04, 1998 |
| PCT/US98/11422 | Non-provisional of | 60/048,885 | Jun. 06, 1997 |
| PCT/US98/11422 | Non-provisional of | 60/049,375 | Jun. 06, 1997 |
| PCT/US98/11422 | Non-provisional of | 60/048,881 | Jun. 06, 1997 |
| PCT/US98/11422 | Non-provisional of | 60/048,880 | Jun. 06, 1997 |
| PCT/US98/11422 | Non-provisional of | 60/048,896 | Jun. 06, 1997 |
| PCT/US98/11422 | Non-provisional of | 60/049,020 | Jun. 06, 1997 |
| PCT/US98/11422 | Non-provisional of | 60/048,876 | Jun. 06, 1997 |
| PCT/US98/11422 | Non-provisional of | 60/048,895 | Jun. 06, 1997 |
| PCT/US98/11422 | Non-provisional of | 60/048,884 | Jun. 06, 1997 |
| PCT/US98/11422 | Non-provisional of | 60/048,894 | Jun. 06, 1997 |
| PCT/US98/11422 | Non-provisional of | 60/048,971 | Jun. 06, 1997 |
| PCT/US98/11422 | Non-provisional of | 60/048,964 | Jun. 06, 1997 |
| PCT/US98/11422 | Non-provisional of | 60/048,882 | Jun. 06, 1997 |
| PCT/US98/11422 | Non-provisional of | 60/048,899 | Jun. 06, 1997 |
| PCT/US98/11422 | Non-provisional of | 60/048,893 | Jun. 06, 1997 |
| PCT/US98/11422 | Non-provisional of | 60/048,900 | Jun. 06, 1997 |
| PCT/US98/11422 | Non-provisional of | 60/048,901 | Jun. 06, 1997 |
| PCT/US98/11422 | Non-provisional of | 60/048,892 | Jun. 06, 1997 |
| PCT/US98/11422 | Non-provisional of | 60/048,915 | Jun. 06, 1997 |
| PCT/US98/11422 | Non-provisional of | 60/049,019 | Jun. 06, 1997 |
| PCT/US98/11422 | Non-provisional of | 60/048,970 | Jun. 06, 1997 |
| PCT/US98/11422 | Non-provisional of | 60/048,972 | Jun. 06, 1997 |
| PCT/US98/11422 | Non-provisional of | 60/048,916 | Jun. 06, 1997 |
| PCT/US98/11422 | Non-provisional of | 60/049,373 | Jun. 06, 1997 |
| PCT/US98/11422 | Non-provisional of | 60/048,875 | Jun. 06, 1997 |
| PCT/US98/11422 | Non-provisional of | 60/049,374 | Jun. 06, 1997 |
| PCT/US98/11422 | Non-provisional of | 60/048,917 | Jun. 06, 1997 |
| PCT/US98/11422 | Non-provisional of | 60/048,949 | Jun. 06, 1997 |
| PCT/US98/11422 | Non-provisional of | 60/048,974 | Jun. 06, 1997 |
| PCT/US98/11422 | Non-provisional of | 60/048,883 | Jun. 06, 1997 |
| PCT/US98/11422 | Non-provisional of | 60/048,897 | Jun. 06, 1997 |
| PCT/US98/11422 | Non-provisional of | 60/048,898 | Jun. 06, 1997 |
| PCT/US98/11422 | Non-provisional of | 60/048,962 | Jun. 06, 1997 |
| PCT/US98/11422 | Non-provisional of | 60/048,963 | Jun. 06, 1997 |
| PCT/US98/11422 | Non-provisional of | 60/048,877 | Jun. 06, 1997 |
| PCT/US98/11422 | Non-provisional of | 60/048,878 | Jun. 06, 1997 |
| PCT/US98/11422 | Non-provisional of | 60/057,645 | Sep. 05, 1997 |
| PCT/US98/11422 | Non-provisional of | 60/057,642 | Sep. 05, 1997 |
| PCT/US98/11422 | Non-provisional of | 60/057,668 | Sep. 05, 1997 |
| PCT/US98/11422 | Non-provisional of | 60/057,635 | Sep. 05, 1997 |
| PCT/US98/11422 | Non-provisional of | 60/057,627 | Sep. 05, 1997 |
| PCT/US98/11422 | Non-provisional of | 60/057,667 | Sep. 05, 1997 |
| PCT/US98/11422 | Non-provisional of | 60/057,666 | Sep. 05, 1997 |
| PCT/US98/11422 | Non-provisional of | 60/057,764 | Sep. 05, 1997 |
| PCT/US98/11422 | Non-provisional of | 60/057,643 | Sep. 05, 1997 |
| PCT/US98/11422 | Non-provisional of | 60/057,769 | Sep. 05, 1997 |
| PCT/US98/11422 | Non-provisional of | 60/057,763 | Sep. 05, 1997 |
| PCT/US98/11422 | Non-provisional of | 60/057,650 | Sep. 05, 1997 |
| PCT/US98/11422 | Non-provisional of | 60/057,584 | Sep. 05, 1997 |
| PCT/US98/11422 | Non-provisional of | 60/057,647 | Sep. 05, 1997 |
| PCT/US98/11422 | Non-provisional of | 60/057,661 | Sep. 05, 1997 |
| PCT/US98/11422 | Non-provisional of | 60/057,662 | Sep. 05, 1997 |
| PCT/US98/11422 | Non-provisional of | 60/057,646 | Sep. 05, 1997 |
| PCT/US98/11422 | Non-provisional of | 60/057,654 | Sep. 05, 1997 |
| PCT/US98/11422 | Non-provisional of | 60/057,651 | Sep. 05, 1997 |
| PCT/US98/11422 | Non-provisional of | 60/057,644 | Sep. 05, 1997 |
| PCT/US98/11422 | Non-provisional of | 60/057,765 | Sep. 05, 1997 |
| PCT/US98/11422 | Non-provisional of | 60/057,762 | Sep. 05, 1997 |
| PCT/US98/11422 | Non-provisional of | 60/057,775 | Sep. 05, 1997 |
| PCT/US98/11422 | Non-provisional of | 60/057,648 | Sep. 05, 1997 |
| PCT/US98/11422 | Non-provisional of | 60/057,774 | Sep. 05, 1997 |
| PCT/US98/11422 | Non-provisional of | 60/057,649 | Sep. 05, 1997 |
| PCT/US98/11422 | Non-provisional of | 60/057,770 | Sep. 05, 1997 |
| PCT/US98/11422 | Non-provisional of | 60/057,771 | Sep. 05, 1997 |
| PCT/US98/11422 | Non-provisional of | 60/057,761 | Sep. 05, 1997 |
| PCT/US98/11422 | Non-provisional of | 60/057,760 | Sep. 05, 1997 |
| PCT/US98/11422 | Non-provisional of | 60/057,776 | Sep. 05, 1997 |
| PCT/US98/11422 | Non-provisional of | 60/057,778 | Sep. 05, 1997 |
| PCT/US98/11422 | Non-provisional of | 60/057,629 | Sep. 05, 1997 |
| PCT/US98/11422 | Non-provisional of | 60/057,628 | Sep. 05, 1997 |
| PCT/US98/11422 | Non-provisional of | 60/057,777 | Sep. 05, 1997 |
| PCT/US98/11422 | Non-provisional of | 60/057,634 | Sep. 05, 1997 |
| PCT/US98/11422 | Non-provisional of | 60/070,923 | Dec. 18, 1997 |
| 10/100,683 | Continuation-in-part of | PCT/US01/05614 | Feb. 21, 2001 |
| PCT/US01/05614 | Non-provisional of | 60/184,836 | Feb. 24, 2000 |
| PCT/US01/05614 | Non-provisional of | 60/193,170 | Mar. 29, 2000 |
| 10/100,683 | Continuation-in-part of | PCT/US98/12125 | Jun. 11, 1998 |
| PCT/US98/12125 | Non-provisional of | 60/049,547 | Jun. 13, 1997 |
| PCT/US98/12125 | Non-provisional of | 60/049,548 | Jun. 13, 1997 |
| PCT/US98/12125 | Non-provisional of | 60/049,549 | Jun. 13, 1997 |
| PCT/US98/12125 | Non-provisional of | 60/049,550 | Jun. 13, 1997 |
| PCT/US98/12125 | Non-provisional of | 60/049,566 | Jun. 13, 1997 |
| PCT/US98/12125 | Non-provisional of | 60/049,606 | Jun. 13, 1997 |
| PCT/US98/12125 | Non-provisional of | 60/049,607 | Jun. 13, 1997 |
| PCT/US98/12125 | Non-provisional of | 60/049,608 | Jun. 13, 1997 |
| PCT/US98/12125 | Non-provisional of | 60/049,609 | Jun. 13, 1997 |
| PCT/US98/12125 | Non-provisional of | 60/049,610 | Jun. 13, 1997 |
| PCT/US98/12125 | Non-provisional of | 60/049,611 | Jun. 13, 1997 |
| PCT/US98/12125 | Non-provisional of | 60/050,901 | Jun. 13, 1997 |
| PCT/US98/12125 | Non-provisional of | 60/052,989 | Jun. 13, 1997 |
| PCT/US98/12125 | Non-provisional of | 60/051,919 | Jul. 08, 1997 |
| PCT/US98/12125 | Non-provisional of | 60/055,984 | Aug. 18, 1997 |
| PCT/US98/12125 | Non-provisional of | 60/058,665 | Sep. 12, 1997 |
| PCT/US98/12125 | Non-provisional of | 60/058,668 | Sep. 12, 1997 |
| PCT/US98/12125 | Non-provisional of | 60/058,669 | Sep. 12, 1997 |
| PCT/US98/12125 | Non-provisional of | 60/058,750 | Sep. 12, 1997 |
| PCT/US98/12125 | Non-provisional of | 60/058,971 | Sep. 12, 1997 |
| PCT/US98/12125 | Non-provisional of | 60/058,972 | Sep. 12, 1997 |
| PCT/US98/12125 | Non-provisional of | 60/058,975 | Sep. 12, 1997 |
| PCT/US98/12125 | Non-provisional of | 60/060,834 | Oct. 02, 1997 |
| PCT/US98/12125 | Non-provisional of | 60/060,841 | Oct. 02, 1997 |
| PCT/US98/12125 | Non-provisional of | 60/060,844 | Oct. 02, 1997 |
| PCT/US98/12125 | Non-provisional of | 60/060,865 | Oct. 02, 1997 |
| PCT/US98/12125 | Non-provisional of | 60/061,059 | Oct. 02, 1997 |
| PCT/US98/12125 | Non-provisional of | 60/061,060 | Oct. 02, 1997 |
| 10/100,683 | Continuation-in-part of | 09/627,081 | Jul. 27, 2000 |
| 09/627,081 | Continuation of | 09/213,365 | Dec. 17, 1998 |
| 09/213,365 | Continuation-in-part of | PCT/US98/13608 | Jun. 30, 1998 |
| 10/100,683 | Continuation-in-part of | PCT/US98/13608 | Jun. 30, 1998 |
| PCT/US98/13608 | Non-provisional of | 60/051,480 | Jul. 01, 1997 |
| PCT/US98/13608 | Non-provisional of | 60/051,381 | Jul. 01, 1997 |
| PCT/US98/13608 | Non-provisional of | 60/058,663 | Sep. 12, 1997 |
| PCT/US98/13608 | Non-provisional of | 60/058,598 | Sep. 12, 1997 |
| 10/100,683 | Continuation-in-part of | 09/984,490 | Oct. 30, 2001 |
| 09/984,490 | Divisional of | 09/227,357 | Jan. 08, 1999 |
| 09/227,357 | Continuation-in-part of | PCT/US98/13684 | Jul. 07, 1998 |
| 10/100,683 | Continuation-in-part of | 09/983,802 | Oct. 25, 2001 |
| 09/983,802 | Continuation of | 09/227,357 | Oct. 10, 2001 |
| 09/227,357 | Continuation-in-part of | PCT/US98/13684 | Jul. 07, 1998 |
| 10/100,683 | Continuation-in-part of | 09/973,278 | Oct. 10, 2001 |
| 09/973,278 | Non-provisional of | 60/239,899 | Oct. 13, 2000 |
| 09/973,278 | Continuation-in-part of | 09/227,357 | Jan. 08, 1999 |
| 09/227,357 | Continuation-in-part of | PCT/US98/13684 | Jul. 07, 1998 |
| 10/100,683 | Continuation-in-part of | PCT/US98/13684 | Jul. 07, 1998 |
| PCT/US98/13684 | Non-provisional of | 60/051,926 | Jul. 08, 1997 |
| PCT/US98/13684 | Non-provisional of | 60/052,793 | Jul. 08, 1997 |
| PCT/US98/13684 | Non-provisional of | 60/051,925 | Jul. 08, 1997 |
| PCT/US98/13684 | Non-provisional of | 60/051,929 | Jul. 08, 1997 |
| PCT/US98/13684 | Non-provisional of | 60/052,803 | Jul. 08, 1997 |
| PCT/US98/13684 | Non-provisional of | 60/052,732 | Jul. 08, 1997 |
| PCT/US98/13684 | Non-provisional of | 60/051,931 | Jul. 08, 1997 |
| PCT/US98/13684 | Non-provisional of | 60/051,932 | Jul. 08, 1997 |
| PCT/US98/13684 | Non-provisional of | 60/051,916 | Jul. 08, 1997 |
| PCT/US98/13684 | Non-provisional of | 60/051,930 | Jul. 08, 1997 |
| PCT/US98/13684 | Non-provisional of | 60/051,918 | Jul. 08, 1997 |
| PCT/US98/13684 | Non-provisional of | 60/051,920 | Jul. 08, 1997 |
| PCT/US98/13684 | Non-provisional of | 60/052,733 | Jul. 08, 1997 |
| PCT/US98/13684 | Non-provisional of | 60/052,795 | Jul. 08, 1997 |
| PCT/US98/13684 | Non-provisional of | 60/051,919 | Jul. 08, 1997 |
| PCT/US98/13684 | Non-provisional of | 60/051,928 | Jul. 08, 1997 |
| PCT/US98/13684 | Non-provisional of | 60/055,722 | Aug. 18, 1997 |
| PCT/US98/13684 | Non-provisional of | 60/055,723 | Aug. 18, 1997 |
| PCT/US98/13684 | Non-provisional of | 60/055,948 | Aug. 18, 1997 |
| PCT/US98/13684 | Non-provisional of | 60/055,949 | Aug. 18, 1997 |
| PCT/US98/13684 | Non-provisional of | 60/055,953 | Aug. 18, 1997 |
| PCT/US98/13684 | Non-provisional of | 60/055,950 | Aug. 18, 1997 |
| PCT/US98/13684 | Non-provisional of | 60/055,947 | Aug. 18, 1997 |
| PCT/US98/13684 | Non-provisional of | 60/055,964 | Aug. 18, 1997 |
| PCT/US98/13684 | Non-provisional of | 60/056,360 | Aug. 18, 1997 |
| PCT/US98/13684 | Non-provisional of | 60/055,684 | Aug. 18, 1997 |
| PCT/US98/13684 | Non-provisional of | 60/055,984 | Aug. 18, 1997 |
| PCT/US98/13684 | Non-provisional of | 60/055,954 | Aug. 18, 1997 |
| PCT/US98/13684 | Non-provisional of | 60/058,785 | Sep. 12, 1997 |
| PCT/US98/13684 | Non-provisional of | 60/058,664 | Sep. 12, 1997 |
| PCT/US98/13684 | Non-provisional of | 60/058,660 | Sep. 12, 1997 |
| PCT/US98/13684 | Non-provisional of | 60/058,661 | Sep. 12, 1997 |
| 10/100,683 | Continuation-in-part of | 09/776,724 | Feb. 06, 2001 |
| 09/776,724 | Non-provisional of | 60/180,909 | Feb. 08, 2000 |
| 09/776,724 | Continuation-in-part of | 09/669,688 | Sep. 26, 2000 |
| 09/669,688 | Continuation of | 09/229,982 | Jan. 14, 1999 |
| 09/229,982 | Continuation-in-part of | PCT/US98/14613 | Jul. 15, 1998 |
| 10/100,683 | Continuation-in-part of | 09/669,688 | Sep. 26, 2000 |
| 09/669,688 | Continuation of | 09/229,982 | Jan. 14, 1999 |
| 09/229,982 | Continuation-in-part of | PCT/US98/14613 | Jul. 15, 1998 |
| 10/100,683 | Continuation-in-part of | 09/229,982 | Jan. 14, 1999 |
| 09/229,982 | Continuation-in-part of | PCT/US98/14613 | Jul. 15, 1998 |
| 10/100,683 | Continuation-in-part of | PCT/US98/14613 | Jul. 15, 1998 |
| PCT/US98/14613 | Non-provisional of | 60/052,661 | Jul. 16, 1997 |
| PCT/US98/14613 | Non-provisional of | 60/052,872 | Jul. 16, 1997 |
| PCT/US98/14613 | Non-provisional of | 60/052,871 | Jul. 16, 1997 |
| PCT/US98/14613 | Non-provisional of | 60/052,874 | Jul. 16, 1997 |
| PCT/US98/14613 | Non-provisional of | 60/052,873 | Jul. 16, 1997 |
| PCT/US98/14613 | Non-provisional of | 60/052,870 | Jul. 16, 1997 |
| PCT/US98/14613 | Non-provisional of | 60/052,875 | Jul. 16, 1997 |
| PCT/US98/14613 | Non-provisional of | 60/053,440 | Jul. 22, 1997 |
| PCT/US98/14613 | Non-provisional of | 60/053,441 | Jul. 22, 1997 |
| PCT/US98/14613 | Non-provisional of | 60/053,442 | Jul. 22, 1997 |
| PCT/US98/14613 | Non-provisional of | 60/056,359 | Aug. 18, 1997 |
| PCT/US98/14613 | Non-provisional of | 60/055,725 | Aug. 18, 1997 |
| PCT/US98/14613 | Non-provisional of | 60/055,985 | Aug. 18, 1997 |
| PCT/US98/14613 | Non-provisional of | 60/055,952 | Aug. 18, 1997 |
| PCT/US98/14613 | Non-provisional of | 60/055,989 | Aug. 18, 1997 |
| PCT/US98/14613 | Non-provisional of | 60/056,361 | Aug. 18, 1997 |
| PCT/US98/14613 | Non-provisional of | 60/055,726 | Aug. 18, 1997 |
| PCT/US98/14613 | Non-provisional of | 60/055,724 | Aug. 18, 1997 |
| PCT/US98/14613 | Non-provisional of | 60/055,946 | Aug. 18, 1997 |
| PCT/US98/14613 | Non-provisional of | 60/055,683 | Aug. 18, 1997 |
| 10/100,683 | Non-provisional of | 60/295,558 | Jun. 05, 2001 |
| 10/100,683 | Continuation-in-part of | 09/820,649 | Mar. 30, 2001 |
| 09/820,649 | Continuation of | 09/666,984 | Sep. 21, 2000 |
| 09/666,984 | Continuation of | 09/236,557 | Jan. 26, 1999 |
| 09/236,557 | Continuation-in-part of | PCT/US98/15949 | Jul. 29, 1998 |
| 10/100,683 | Continuation-in-part of | PCT/US98/15949 | Jul. 29, 1998 |
| PCT/US98/15949 | Non-provisional of | 60/054,212 | Jul. 30, 1997 |
| PCT/US98/15949 | Non-provisional of | 60/054,209 | Jul. 30, 1997 |
| PCT/US98/15949 | Non-provisional of | 60/054,234 | Jul. 30, 1997 |
| PCT/US98/15949 | Non-provisional of | 60/054,218 | Jul. 30, 1997 |
| PCT/US98/15949 | Non-provisional of | 60/054,214 | Jul. 30, 1997 |
| PCT/US98/15949 | Non-provisional of | 60/054,236 | Jul. 30, 1997 |
| PCT/US98/15949 | Non-provisional of | 60/054,215 | Jul. 30, 1997 |
| PCT/US98/15949 | Non-provisional of | 60/054,211 | Jul. 30, 1997 |
| PCT/US98/15949 | Non-provisional of | 60/054,217 | Jul. 30, 1997 |
| PCT/US98/15949 | Non-provisional of | 60/054,213 | Jul. 30, 1997 |
| PCT/US98/15949 | Non-provisional of | 60/055,968 | Aug. 18, 1997 |
| PCT/US98/15949 | Non-provisional of | 60/055,969 | Aug. 18, 1997 |
| PCT/US98/15949 | Non-provisional of | 60/055,972 | Aug. 18, 1997 |
| PCT/US98/15949 | Non-provisional of | 60/056,561 | Aug. 19, 1997 |
| PCT/US98/15949 | Non-provisional of | 60/056,534 | Aug. 19, 1997 |
| PCT/US98/15949 | Non-provisional of | 60/056,729 | Aug. 19, 1997 |
| PCT/US98/15949 | Non-provisional of | 60/056,543 | Aug. 19, 1997 |
| PCT/US98/15949 | Non-provisional of | 60/056,727 | Aug. 19, 1997 |
| PCT/US98/15949 | Non-provisional of | 60/056,554 | Aug. 19, 1997 |
| PCT/US98/15949 | Non-provisional of | 60/056,730 | Aug. 19, 1997 |
| 10/100,683 | Continuation-in-part of | 09/969,730 | Oct. 04, 2001 |
| 09/969,730 | Continuation-in-part of | 09/774,639 | Feb. 01, 2001 |
| 09/774,639 | Continuation of | 09/244,112 | Feb. 04, 1999 |
| 09/244,112 | Continuation-in-part of | PCT/US98/16235 | Aug. 04, 1998 |
| 10/100,683 | Continuation-in-part of | 09/774,639 | Feb. 01, 2001 |
| 09/774,639 | Continuation of | 09/244,112 | Feb. 04, 1999 |
| 09/244,112 | Continuation-in-part of | PCT/US98/16235 | Aug. 04, 1998 |
| 10/100,683 | Continuation-in-part of | 09/969,730 | Oct. 04, 2001 |
| 09/969,730 | Non-provisional of | 60/238,291 | Oct. 06, 2000 |
| 10/100,683 | Continuation-in-part of | PCT/US98/16235 | Aug. 04, 1998 |
| PCT/US98/16235 | Non-provisional of | 60/055,386 | Aug. 05, 1997 |
| PCT/US98/16235 | Non-provisional of | 60/054,807 | Aug. 05, 1997 |
| PCT/US98/16235 | Non-provisional of | 60/055,312 | Aug. 05, 1997 |
| PCT/US98/16235 | Non-provisional of | 60/055,309 | Aug. 05, 1997 |
| PCT/US98/16235 | Non-provisional of | 60/054,798 | Aug. 05, 1997 |
| PCT/US98/16235 | Non-provisional of | 60/055,310 | Aug. 05, 1997 |
| PCT/US98/16235 | Non-provisional of | 60/054,806 | Aug. 05, 1997 |
| PCT/US98/16235 | Non-provisional of | 60/054,809 | Aug. 05, 1997 |
| PCT/US98/16235 | Non-provisional of | 60/054,804 | Aug. 05, 1997 |
| PCT/US98/16235 | Non-provisional of | 60/054,803 | Aug. 05, 1997 |
| PCT/US98/16235 | Non-provisional of | 60/054,808 | Aug. 05, 1997 |
| PCT/US98/16235 | Non-provisional of | 60/055,311 | Aug. 05, 1997 |
| PCT/US98/16235 | Non-provisional of | 60/055,986 | Aug. 18, 1997 |
| PCT/US98/16235 | Non-provisional of | 60/055,970 | Aug. 18, 1997 |
| PCT/US98/16235 | Non-provisional of | 60/056,563 | Aug. 19, 1997 |
| 09/288,143 | Continuation-in-part of | PCT/US98/21142 | Oct. 08, 1998 |
| 10/100,683 | Continuation-in-part of | PCT/US98/21142 | Oct. 08, 1998 |
| PCT/US98/21142 | Non-provisional of | 60/061,463 | Oct. 09, 1997 |
| PCT/US98/21142 | Non-provisional of | 60/061,529 | Oct. 09, 1997 |
| PCT/US98/21142 | Non-provisional of | 60/071,498 | Oct. 09, 1997 |
| PCT/US98/21142 | Non-provisional of | 60/061,527 | Oct. 09, 1997 |
| PCT/US98/21142 | Non-provisional of | 60/061,536 | Oct. 09, 1997 |
| PCT/US98/21142 | Non-provisional of | 60/061,532 | Oct. 09, 1997 |
| 10/100,683 | Continuation-in-part of | 09/296,622 | Apr. 23, 1999 |
| 09/296,622 | Continuation-in-part of | PCT/US98/22376 | Oct. 23, 1998 |
| 10/100,683 | Continuation-in-part of | PCT/US98/22376 | Oct. 23, 1998 |
| PCT/US98/22376 | Non-provisional of | 60/063,099 | Oct. 24, 1997 |
| PCT/US98/22376 | Non-provisional of | 60/063,088 | Oct. 24, 1997 |
| PCT/US98/22376 | Non-provisional of | 60/063,100 | Oct. 24, 1997 |
| PCT/US98/22376 | Non-provisional of | 60/063,387 | Oct. 24, 1997 |
| PCT/US98/22376 | Non-provisional of | 60/063,148 | Oct. 24, 1997 |
| PCT/US98/22376 | Non-provisional of | 60/063,386 | Oct. 24, 1997 |
| PCT/US98/22376 | Non-provisional of | 60/062,784 | Oct. 24, 1997 |
| PCT/US98/22376 | Non-provisional of | 60/063,091 | Oct. 24, 1997 |
| PCT/US98/22376 | Non-provisional of | 60/063,090 | Oct. 24, 1997 |
| PCT/US98/22376 | Non-provisional of | 60/063,089 | Oct. 24, 1997 |
| PCT/US98/22376 | Non-provisional of | 60/063,092 | Oct. 24, 1997 |
| PCT/US98/22376 | Non-provisional of | 60/063,111 | Oct. 24, 1997 |
| PCT/US98/22376 | Non-provisional of | 60/063,101 | Oct. 24, 1997 |
| PCT/US98/22376 | Non-provisional of | 60/063,109 | Oct. 24, 1997 |
| PCT/US98/22376 | Non-provisional of | 60/063,110 | Oct. 24, 1997 |
| PCT/US98/22376 | Non-provisional of | 60/063,098 | Oct. 24, 1997 |
| PCT/US98/22376 | Non-provisional of | 60/063,097 | Oct. 24, 1997 |
| 10/100,683 | Continuation-in-part of | 09/974,879 | Oct. 12, 2001 |
| 09/974,879 | Non-provisional of | 60/239,893 | Oct. 13, 2000 |
| 09/974,879 | Continuation-in-part of | 09/818,683 | Mar. 28, 2001 |
| 09/818,683 | Continuation of | 09/305,736 | May 05, 1999 |
| 09/305,736 | Continuation-in-part of | PCT/US98/23435 | Nov. 04, 1998 |
| 10/100,683 | Continuation-in-part of | 09/818,683 | Mar. 28, 2001 |
| 09/818,683 | Continuation of | 09/305,736 | May 05, 1999 |
| 09/305,736 | Continuation-in-part of | PCT/US98/23435 | Nov. 04, 1998 |
| 10/100,683 | Continuation-in-part of | 09/305,736 | May 05, 1999 |
| 09/305,736 | Continuation-in-part of | PCT/US98/23435 | Nov. 04, 1998 |
| 10/100,683 | Continuation-in-part of | PCT/US98/23435 | Nov. 04, 1998 |
| PCT/US98/23435 | Non-provisional of | 60/064,911 | Nov. 07, 1997 |
| PCT/US98/23435 | Non-provisional of | 60/064,912 | Nov. 07, 1997 |
| PCT/US98/23435 | Non-provisional of | 60/064,983 | Nov. 07, 1997 |
| PCT/US98/23435 | Non-provisional of | 60/064,900 | Nov. 07, 1997 |
| PCT/US98/23435 | Non-provisional of | 60/064,988 | Nov. 07, 1997 |
| PCT/US98/23435 | Non-provisional of | 60/064,987 | Nov. 07, 1997 |
| PCT/US98/23435 | Non-provisional of | 60/064,908 | Nov. 07, 1997 |
| PCT/US98/23435 | Non-provisional of | 60/064,984 | Nov. 07, 1997 |
| PCT/US98/23435 | Non-provisional of | 60/064,985 | Nov. 07, 1997 |
| PCT/US98/23435 | Non-provisional of | 60/066,094 | Nov. 17, 1997 |
| PCT/US98/23435 | Non-provisional of | 60/066,100 | Nov. 17, 1997 |
| PCT/US98/23435 | Non-provisional of | 60/066,089 | Nov. 17, 1997 |
| PCT/US98/23435 | Non-provisional of | 60/066,095 | Nov. 17, 1997 |
| PCT/US98/23435 | Non-provisional of | 60/066,090 | Nov. 17, 1997 |
| 10/100,683 | Continuation-in-part of | 09/334,595 | Jun. 17, 1999 |
| 09/334,595 | Continuation-in-part of | PCT/US98/27059 | Dec. 17, 1998 |
| 10/100,683 | Continuation-in-part of | PCT/US98/27059 | Dec. 17, 1998 |
| PCT/US98/27059 | Non-provisional of | 60/070,923 | Dec. 18, 1997 |
| PCT/US98/27059 | Non-provisional of | 60/068,007 | Dec. 18, 1997 |
| PCT/US98/27059 | Non-provisional of | 60/068,057 | Dec. 18, 1997 |
| PCT/US98/27059 | Non-provisional of | 60/068,006 | Dec. 18, 1997 |
| PCT/US98/27059 | Non-provisional of | 60/068,369 | Dec. 19, 1997 |
| PCT/US98/27059 | Non-provisional of | 60/068,367 | Dec. 19, 1997 |
| PCT/US98/27059 | Non-provisional of | 60/068,368 | Dec. 19, 1997 |
| PCT/US98/27059 | Non-provisional of | 60/068,169 | Dec. 19, 1997 |
| PCT/US98/27059 | Non-provisional of | 60/068,053 | Dec. 18, 1997 |
| PCT/US98/27059 | Non-provisional of | 60/068,064 | Dec. 18, 1997 |
| PCT/US98/27059 | Non-provisional of | 60/068,054 | Dec. 18, 1997 |
| PCT/US98/27059 | Non-provisional of | 60/068,008 | Dec. 18, 1997 |
| PCT/US98/27059 | Non-provisional of | 60/068,365 | Dec. 19, 1997 |
| 10/100,683 | Continuation-in-part of | 09/938,671 | Aug. 27, 2001 |
| 09/938,671 | Continuation of | 09/739,907 | Dec. 20, 2000 |
| 09/739,907 | Continuation of | 09/348,457 | Jul. 07, 1999 |
| 09/348,457 | Continuation-in-part of | PCT/US99/00108 | Jan. 06, 1999 |
| 10/100,683 | Continuation-in-part of | 09/739,907 | Dec. 20, 2000 |
| 09/739,907 | Continuation of | 09/348,457 | Jul. 07, 1999 |
| 09/348,457 | Continuation-in-part of | PCT/US99/00108 | Jan. 06, 1999 |
| 10/100,683 | Continuation-in-part of | 09/348,457 | Jul. 07, 1999 |
| 09/348,457 | Continuation-in-part of | PCT/US99/00108 | Jan. 06, 1999 |
| 10/100,683 | Continuation-in-part of | PCT/US99/00108 | Jan. 06, 1999 |
| PCT/US99/00108 | Non-provisional of | 60/070,704 | Jan. 07, 1998 |
| PCT/US99/00108 | Non-provisional of | 60/070,658 | Jan. 07, 1998 |
| PCT/US99/00108 | Non-provisional of | 60/070,692 | Jan. 07, 1998 |
| PCT/US99/00108 | Non-provisional of | 60/070,657 | Jan. 07, 1998 |
| 10/100,683 | Continuation-in-part of | 09/949,925 | Sep. 12, 2001 |
| 09/949,925 | Non-provisional of | 60/232,150 | Sep. 12, 2000 |
| 09/949,925 | Continuation-in-part of | PCT/US99/01621 | Jan. 27, 1999 |
| 09/949,925 | Continuation-in-part of | 09/363,044 | Jul. 29, 1999 |
| 09/363,044 | Continuation-in-part of | PCT/US99/01621 | Jan. 27, 1999 |
| 10/100,683 | Continuation-in-part of | 09/813,153 | Mar. 21, 2001 |
| 09/813,153 | Continuation of | 09/363,044 | Jul. 29, 1999 |
| 09/363,044 | Continuation-in-part of | PCT/US99/01621 | Jan. 27, 1999 |
| 10/100,683 | Continuation-in-part of | 09/363,044 | Jul. 29, 1999 |
| 09/363,044 | Continuation-in-part of | PCT/US99/01621 | Jan. 27, 1999 |
| 10/100,683 | Continuation-in-part of | PCT/US99/01621 | Jan. 27, 1999 |
| PCT/US99/01621 | Non-provisional of | 60/073,170 | Jan. 30, 1998 |
| PCT/US99/01621 | Non-provisional of | 60/073,167 | Jan. 30, 1998 |
| PCT/US99/01621 | Non-provisional of | 60/073,165 | Jan. 30, 1998 |
| PCT/US99/01621 | Non-provisional of | 60/073,164 | Jan. 30, 1998 |
| PCT/US99/01621 | Non-provisional of | 60/073,162 | Jan. 30, 1998 |
| PCT/US99/01621 | Non-provisional of | 60/073,161 | Jan. 30, 1998 |
| PCT/US99/01621 | Non-provisional of | 60/073,160 | Jan. 30, 1998 |
| PCT/US99/01621 | Non-provisional of | 60/073,159 | Jan. 30, 1998 |
| 10/100,683 | Continuation-in-part of | 10/062,548 | Feb. 05, 2002 |
| 10/062,548 | Continuation of | 09/369,247 | Aug. 05, 1999 |
| 09/369,247 | Continuation-in-part of | PCT/US99/02293 | Feb. 04, 1999 |
| 10/100,683 | Continuation-in-part of | 09/369,247 | Aug. 05, 1999 |
| 09/369,247 | Continuation-in-part of | PCT/US99/02293 | Feb. 04, 1999 |
| 10/100,683 | Continuation-in-part of | PCT/US99/02293 | Feb. 04, 1999 |
| PCT/US99/02293 | Non-provisional of | 60/074,118 | Feb. 09, 1998 |
| PCT/US99/02293 | Non-provisional of | 60/074,157 | Feb. 09, 1998 |
| PCT/US99/02293 | Non-provisional of | 60/074,037 | Feb. 09, 1998 |
| PCT/US99/02293 | Non-provisional of | 60/074,141 | Feb. 09, 1998 |
| PCT/US99/02293 | Non-provisional of | 60/074,341 | Feb. 09, 1998 |
| 10/100,683 | Continuation-in-part of | 09/716,129 | Nov. 17, 2000 |
| 09/716,129 | Continuation-in-part of | PCT/US99/03939 | Feb. 24, 1999 |
| 09/716,129 | Continuation of | 09/382,572 | Aug. 25, 1999 |
| 09/382,572 | Continuation-in-part of | PCT/US99/03939 | Feb. 24, 1999 |
| 10/100,683 | Continuation-in-part of | PCT/US99/03939 | Feb. 24, 1999 |
| PCT/US99/03939 | Non-provisional of | 60/076,053 | Feb. 26, 1998 |
| PCT/US99/03939 | Non-provisional of | 60/076,051 | Feb. 26, 1998 |
| PCT/US99/03939 | Non-provisional of | 60/076,054 | Feb. 26, 1998 |
| PCT/US99/03939 | Non-provisional of | 60/076,052 | Feb. 26, 1998 |
| PCT/US99/03939 | Non-provisional of | 60/076,057 | Feb. 26, 1998 |
| 10/100,683 | Continuation-in-part of | 09/798,889 | Mar. 06, 2001 |
| 09/798,889 | Continuation of | 09/393,022 | Sep. 09, 1999 |
| 09/393,022 | Continuation-in-part of | PCT/US99/05721 | Mar. 11, 1999 |
| 10/100,683 | Continuation-in-part of | PCT/US99/05721 | Mar. 11, 1999 |
| PCT/US99/05721 | Non-provisional of | 60/077,714 | Mar. 12, 1998 |
| PCT/US99/05721 | Non-provisional of | 60/077,686 | Mar. 12, 1998 |
| PCT/US99/05721 | Non-provisional of | 60/077,687 | Mar. 12, 1998 |
| PCT/US99/05721 | Non-provisional of | 60/077,696 | Mar. 12, 1998 |
| 10/100,683 | Continuation-in-part of | 09/397,945 | Sep. 17, 1999 |
| 09/397,945 | Continuation-in-part of | PCT/US99/05804 | Mar. 18, 1999 |
| 10/100,683 | Continuation-in-part of | PCT/US99/05804 | Mar. 18, 1999 |
| PCT/US99/05804 | Non-provisional of | 60/078,566 | Mar. 19, 1998 |
| PCT/US99/05804 | Non-provisional of | 60/078,576 | Mar. 19, 1998 |
| PCT/US99/05804 | Non-provisional of | 60/078,573 | Mar. 19, 1998 |
| PCT/US99/05804 | Non-provisional of | 60/078,574 | Mar. 19, 1998 |
| PCT/US99/05804 | Non-provisional of | 60/078,579 | Mar. 19, 1998 |
| PCT/US99/05804 | Non-provisional of | 60/080,314 | Apr. 01, 1998 |
| PCT/US99/05804 | Non-provisional of | 60/080,312 | Apr. 01, 1998 |
| PCT/US99/05804 | Non-provisional of | 60/078,578 | Mar. 19, 1998 |
| PCT/US99/05804 | Non-provisional of | 60/078,581 | Mar. 19, 1998 |
| PCT/US99/05804 | Non-provisional of | 60/078,577 | Mar. 19, 1998 |
| PCT/US99/05804 | Non-provisional of | 60/078,563 | Mar. 19, 1998 |
| PCT/US99/05804 | Non-provisional of | 60/080,313 | Apr. 01, 1998 |
| 10/100,683 | Continuation-in-part of | 09/948,783 | Sep. 10, 2001 |
| 09/948,783 | Non-provisional of | 60/231,846 | Sep. 11, 2000 |
| 09/948,783 | Continuation-in-part of | 09/892,877 | Jun. 28, 2001 |
| 09/892,877 | Continuation of | 09/437,658 | Nov. 10, 1999 |
| 09/437,658 | Continuation-in-part of | PCT/US99/09847 | May 06, 1999 |
| 10/100,683 | Continuation-in-part of | 09/892,877 | Jun. 28, 2001 |
| 09/892,877 | Continuation of | 09/437,658 | Nov. 10, 1999 |
| 09/437,658 | Continuation-in-part of | PCT/US99/09847 | May 06, 1999 |
| 10/100,683 | Continuation-in-part of | PCT/US99/09847 | May 06, 1999 |
| PCT/US99/09847 | Non-provisional of | 60/085,093 | May 12, 1998 |
| PCT/US99/09847 | Non-provisional of | 60/085,094 | May 12, 1998 |
| PCT/US99/09847 | Non-provisional of | 60/085,105 | May 12, 1998 |
| PCT/US99/09847 | Non-provisional of | 60/085,180 | May 12, 1998 |
| PCT/US99/09847 | Non-provisional of | 60/085,927 | May 18, 1998 |
| PCT/US99/09847 | Non-provisional of | 60/085,906 | May 18, 1998 |
| PCT/US99/09847 | Non-provisional of | 60/085,920 | May 18, 1998 |
| PCT/US99/09847 | Non-provisional of | 60/085,924 | May 18, 1998 |
| PCT/US99/09847 | Non-provisional of | 60/085,922 | May 18, 1998 |
| PCT/US99/09847 | Non-provisional of | 60/085,923 | May 18, 1998 |
| PCT/US99/09847 | Non-provisional of | 60/085,921 | May 18, 1998 |
| PCT/US99/09847 | Non-provisional of | 60/085,925 | May 18, 1998 |
| PCT/US99/09847 | Non-provisional of | 60/085,928 | May 18, 1998 |
| 10/100,683 | Continuation-in-part of | 10/050,873 | Jan. 18, 2002 |
| 10/050,873 | Non-provisional of | 60/263,681 | Jan. 24, 2001 |
| 10/050,873 | Non-provisional of | 60/263,230 | Jan. 23, 2001 |
| 10/050,873 | Continuation-in-part of | 09/461,325 | Dec. 14, 1999 |
| 09/461,325 | Continuation-in-part of | PCT/US99/13418 | Jun. 15, 1999 |
| 10/100,683 | Continuation-in-part of | 10/012,542 | Dec. 12, 2001 |
| 10/012,542 | Divisional of | 09/461,325 | Dec. 14, 1999 |
| 09/461,325 | Continuation-in-part of | PCT/US99/13418 | Jun. 15, 1999 |
| 10/100,683 | Continuation-in-part of | 09/461,325 | Dec. 14, 1999 |
| 09/461,325 | Continuation-in-part of | PCT/US99/13418 | Jun. 15, 1999 |
| 10/100,683 | Continuation-in-part of | PCT/US99/13418 | Jun. 15, 1999 |
| PCT/US99/13418 | Non-provisional of | 60/089,507 | Jun. 16, 1998 |
| PCT/US99/13418 | Non-provisional of | 60/089,508 | Jun. 16, 1998 |
| PCT/US99/13418 | Non-provisional of | 60/089,509 | Jun. 16, 1998 |
| PCT/US99/13418 | Non-provisional of | 60/089,510 | Jun. 16, 1998 |
| PCT/US99/13418 | Non-provisional of | 60/090,112 | Jun. 22, 1998 |
| PCT/US99/13418 | Non-provisional of | 60/090,113 | Jun. 22, 1998 |
| 10/100,683 | Continuation-in-part of | 09/984,271 | Oct. 29, 2001 |
| 09/984,271 | Divisional of | 09/482,273 | Jan. 13, 2000 |
| 09/482,273 | Continuation-in-part of | PCT/US99/15849 | Jul. 14, 1999 |
| 10/100,683 | Continuation-in-part of | 09/984,276 | Oct. 29, 2001 |
| 09/984,276 | Divisional of | 09/482,273 | Jan. 13, 2000 |
| 09/482,273 | Continuation-in-part of | PCT/US99/15849 | Jul. 14, 1999 |
| 10/100,683 | Continuation-in-part of | 09/482,273 | Jan. 13, 2000 |
| 09/482,273 | Continuation-in-part of | PCT/US99/15849 | Jul. 14, 1999 |
| 10/100,683 | Continuation-in-part of | PCT/US99/15849 | Jul. 14, 1999 |
| PCT/US99/15849 | Non-provisional of | 60/092,921 | Jul. 15, 1998 |
| PCT/US99/15849 | Non-provisional of | 60/092,922 | Jul. 15, 1998 |
| PCT/US99/15849 | Non-provisional of | 60/092,956 | Jul. 15, 1998 |
| 10/100,683 | Continuation-in-part of | PCT/US01/29871 | Sep. 24, 2001 |
| PCT/US01/29871 | Non-provisional of | 60/234,925 | Sep. 25, 2000 |
| PCT/US01/29871 | Continuation-in-part of | PCT/US01/00911 | Jan. 12, 2001 |
| 10/100,683 | Continuation-in-part of | PCT/US01/00911 | Jan. 12, 2001 |
| PCT/US01/00911 | Continuation-in-part of | 09/482,273 | Jan. 13, 2000 |
| 10/100,683 | Non-provisional of | 60/350,898 | Jan. 25, 2002 |
| 10/100,683 | Continuation-in-part of | 09/489,847 | Jan. 24, 2000 |
| 09/489,847 | Continuation-in-part of | PCT/US99/17130 | Jul. 29, 1999 |
| 10/100,683 | Continuation-in-part of | PCT/US99/17130 | Jul. 29, 1999 |
| PCT/US99/17130 | Non-provisional of | 60/094,657 | Jul. 30, 1998 |
| PCT/US99/17130 | Non-provisional of | 60/095,486 | Aug. 05, 1998 |
| PCT/US99/17130 | Non-provisional of | 60/096,319 | Aug. 12, 1998 |
| PCT/US99/17130 | Non-provisional of | 60/095,454 | Aug. 06, 1998 |
| PCT/US99/17130 | Non-provisional of | 60/095,455 | Aug. 06, 1998 |
| 10/100,683 | Continuation-in-part of | 10/054,988 | Jan. 25, 2002 |
| 10/054,988 | Continuation of | 09/904,615 | Jul. 16, 2001 |
| 09/904,615 | Continuation of | 09/739,254 | Dec. 19, 2000 |
| 09/739,254 | Continuation of | 09/511,554 | Feb. 23, 2000 |
| 09/511,554 | Continuation-in-part of | PCT/US99/19330 | Aug. 24, 1999 |
| 10/100,683 | Continuation-in-part of | 09/904,615 | Jul. 16, 2001 |
| 09/904,615 | Continuation of | 09/739,254 | Dec. 19, 2000 |
| 09/739,254 | Continuation of | 09/511,554 | Feb. 23, 2000 |
| 09/511,554 | Continuation-in-part of | PCT/US99/19330 | Aug. 24, 1999 |
| 10/100,683 | Continuation-in-part of | PCT/US99/19330 | Aug. 24, 1999 |
| PCT/US99/19330 | Non-provisional of | 60/097,917 | Aug. 25, 1998 |
| PCT/US99/19330 | Non-provisional of | 60/098,634 | Aug. 31, 1998 |
| 10/100,683 | Continuation-in-part of | 09/820,893 | Mar. 30, 2001 |
| 09/820,893 | Continuation of | 09/531,119 | Mar. 20, 2000 |
| 09/531,119 | Continuation-in-part of | PCT/US99/22012 | Sep. 22, 1999 |
| 10/100,683 | Continuation-in-part of | PCT/US99/22012 | Sep. 22, 1999 |
| PCT/US99/22012 | Non-provisional of | 60/101,546 | Sep. 23, 1998 |
| PCT/US99/22012 | Non-provisional of | 60/102,895 | Oct. 02, 1998 |
| 10/100,683 | Continuation-in-part of | 09/948,820 | Sep. 10, 2001 |
| 09/948,820 | Continuation of | 09/565,391 | May 05, 2000 |
| 09/565,391 | Continuation-in-part of | PCT/US99/26409 | Nov. 09, 1999 |
| 10/100,683 | Continuation-in-part of | 09/565,391 | May 05, 2000 |
| 09/565,391 | Continuation-in-part of | PCT/US99/26409 | Nov. 09, 1999 |
| 10/100,683 | Continuation-in-part of | PCT/US99/26409 | Nov. 09, 1999 |
| PCT/US99/26409 | Non-provisional of | 60/108,207 | Nov. 12, 1998 |
| 10/100,683 | Continuation-in-part of | 09/895,298 | Jul. 02, 2001 |
| 09/895,298 | Continuation of | 09/591,316 | Jun. 09, 2000 |
| 09/591,316 | Continuation-in-part of | PCT/US99/29950 | Dec. 16, 1999 |
| 10/100,683 | Continuation-in-part of | PCT/US99/29950 | Dec. 16, 1999 |
| PCT/US99/29950 | Non-provisional of | 60/113,006 | Dec. 18, 1998 |
| PCT/US99/29950 | Non-provisional of | 60/112,809 | Dec. 17, 1998 |
| 10/100,683 | Continuation-in-part of | 09/985,153 | Nov. 01, 2001 |
| 09/985,153 | Continuation of | 09/618,150 | Jul. 17, 2000 |
| 09/618,150 | Continuation-in-part of | PCT/US00/00903 | Jan. 18, 2000 |
| 10/100,683 | Continuation-in-part of | PCT/US00/00903 | Jan. 18, 2000 |
| PCT/US00/00903 | Non-provisional of | 60/116,330 | Jan. 19, 1999 |
| 10/100,683 | Continuation-in-part of | 09/997,131 | Nov. 30, 2001 |
| 09/997,131 | Continuation of | 09/628,508 | Jul. 28, 2000 |
| 09/628,508 | Continuation-in-part of | PCT/US00/03062 | Feb. 08, 2000 |
| 10/100,683 | Continuation-in-part of | PCT/US00/03062 | Feb. 08, 2000 |
| PCT/US00/03062 | Non-provisional of | 60/119,468 | Feb. 10, 1999 |
| 10/100,683 | Continuation-in-part of | 10/050,882 | Jan. 18, 2002 |
| 10/050,882 | Continuation of | 09/661,453 | Sep. 13, 2000 |
| 09/661,453 | Continuation-in-part of | PCT/US00/06783 | Mar. 16, 2000 |
| 10/100,683 | Continuation-in-part of | 09/661,453 | Sep. 13, 2000 |
| 09/661,453 | Continuation-in-part of | PCT/US00/06783 | Mar. 16, 2000 |
| 10/100,683 | Continuation-in-part of | PCT/US00/06783 | Mar. 16, 2000 |
| PCT/US00/06783 | Non-provisional of | 60/125,055 | Mar. 18, 1999 |
| 10/100,683 | Continuation-in-part of | 10/050,704 | Jan. 18, 2002 |
| 10/050,704 | Continuation of | 09/684,524 | Oct. 10, 2000 |
| 09/684,524 | Continuation-in-part of | PCT/US00/08979 | Apr. 06, 2000 |
| 10/100,683 | Continuation-in-part of | 09/684,524 | Oct. 10, 2000 |
| 09/684,524 | Continuation-in-part of | PCT/US00/08979 | Apr. 06, 2000 |
| 10/100,683 | Continuation-in-part of | PCT/US00/08979 | Apr. 06, 2000 |
| PCT/US00/08979 | Non-provisional of | 60/128,693 | Apr. 09, 1999 |
| PCT/US00/08979 | Non-provisional of | 60/130,991 | Apr. 26, 1999 |
| 10/100,683 | Continuation-in-part of | 10/042,141 | Jan. 11, 2002 |
| 10/042,141 | Continuation of | 09/726,643 | Dec. 01, 2000 |
| 09/726,643 | Continuation-in-part of | PCT/US00/15187 | Jun. 02, 2000 |
| 10/100,683 | Continuation-in-part of | 09/726,643 | Dec. 01, 2000 |
| 09/726,643 | Continuation-in-part of | PCT/US00/15187 | Jun. 02, 2000 |
| 10/100,683 | Continuation-in-part of | PCT/US00/15187 | Jun. 02, 2000 |
| PCT/US00/15187 | Non-provisional of | 60/137,725 | Jun. 07, 1999 |
| 10/100,683 | Continuation-in-part of | 09/756,168 | Jan. 09, 2001 |
| 09/756,168 | Continuation-in-part of | PCT/US00/19735 | Jul. 23, 1999 |
| 10/100,683 | Continuation-in-part of | PCT/US00/19735 | Jul. 20, 2000 |
| PCT/US00/19735 | Non-provisional of | 60/145,220 | Jul. 23, 1999 |
| 10/100,683 | Continuation-in-part of | 10/060,255 | Feb. 01, 2002 |
| 10/060,255 | Continuation of | 09/781,417 | Feb. 13, 2001 |
| 09/781,417 | Continuation-in-part of | PCT/US00/22325 | Aug. 16, 2000 |
| 10/100,683 | Continuation-in-part of | 09/781,417 | Feb. 13, 2001 |
| 09/781,417 | Continuation-in-part of | PCT/US00/22325 | Aug. 16, 2000 |
| 10/100,683 | Continuation-in-part of | PCT/US00/22325 | Aug. 16, 2000 |
| PCT/US00/22325 | Non-provisional of | 60/149,182 | Aug. 17, 1999 |
| 10/100,683 | Continuation-in-part of | 09/789,561 | Feb. 22, 2001 |
| 09/789,561 | Continuation-in-part of | PCT/US00/24008 | Aug. 31, 2000 |
| 10/100,683 | Continuation-in-part of | PCT/US00/24008 | Aug. 31, 2000 |
| PCT/US00/24008 | Non-provisional of | 60/152,315 | Sep. 03, 1999 |
| PCT/US00/24008 | Non-provisional of | 60/152,317 | Sep. 03, 1999 |
| 10/100,683 | Continuation-in-part of | 09/800,729 | Mar. 08, 2001 |
| 09/800,729 | Continuation-in-part of | PCT/US00/26013 | Sep. 22, 2000 |
| 10/100,683 | Continuation-in-part of | PCT/US00/26013 | Sep. 22, 2000 |
| PCT/US00/26013 | Non-provisional of | 60/155,709 | Sep. 24, 1999 |
| 10/100,683 | Continuation-in-part of | 09/832,129 | Apr. 11, 2001 |
| 09/832,129 | Continuation-in-part of | PCT/US00/28664 | Oct. 17, 2000 |
| 10/100,683 | Continuation-in-part of | PCT/US00/28664 | Oct. 17, 2000 |
| PCT/US00/28664 | Non-provisional of | 60/163,085 | Nov. 02, 1999 |
| PCT/US00/28664 | Non-provisional of | 60/172,411 | Dec. 17, 1999 |
| 10/100,683 | Continuation-in-part of | PCT/US00/29363 | Oct. 25, 2000 |
| PCT/US00/29363 | Non-provisional of | 60/215,139 | Jun. 30, 2000 |
| PCT/US00/29363 | Non-provisional of | 60/162,239 | Oct. 29, 1999 |
| 10/100,683 | Continuation-in-part of | PCT/US00/29360 | Oct. 25, 2000 |
| PCT/US00/29360 | Non-provisional of | 60/215,138 | Jun. 30, 2000 |
| PCT/US00/29360 | Non-provisional of | 60/162,211 | Oct. 29, 1999 |
| 10/100,683 | Continuation-in-part of | PCT/US00/29362 | Oct. 25, 2000 |
| PCT/US00/29362 | Non-provisional of | 60/215,131 | Jun. 30, 2000 |
| PCT/US00/29362 | Non-provisional of | 60/162,240 | Oct. 29, 1999 |
| 10/100,683 | Continuation-in-part of | PCT/US00/29365 | Oct. 25, 2000 |
| PCT/US00/29365 | Non-provisional of | 60/219,666 | Jul. 21, 2000 |
| PCT/US00/29365 | Non-provisional of | 60/162,237 | Oct. 29, 1999 |
| 10/100,683 | Continuation-in-part of | PCT/US00/29364 | Oct. 25, 2000 |
| PCT/US00/29364 | Non-provisional of | 60/215,134 | Jun. 30, 2000 |
| PCT/US00/29364 | Non-provisional of | 60/162,238 | Oct. 29, 1999 |
| 10/100,683 | Continuation-in-part of | PCT/US00/30040 | Nov. 01, 2000 |
| PCT/US00/30040 | Non-provisional of | 60/215,130 | Jun. 30, 2000 |
| PCT/US00/30040 | Non-provisional of | 60/163,580 | Nov. 05, 1999 |
| 10/100,683 | Continuation-in-part of | PCT/US00/30037 | Nov. 01, 2000 |
| PCT/US00/30037 | Non-provisional of | 60/215,137 | Jun. 30, 2000 |
| PCT/US00/30037 | Non-provisional of | 60/163,577 | Nov. 05, 1999 |
| 10/100,683 | Continuation-in-part of | PCT/US00/30045 | Nov. 01, 2000 |
| PCT/US00/30045 | Non-provisional of | 60/215,133 | Jun. 30, 2000 |
| PCT/US00/30045 | Non-provisional of | 60/163,581 | Nov. 05, 1999 |
| 10/100,683 | Continuation-in-part of | PCT/US00/30036 | Nov. 01, 2000 |
| PCT/US00/30036 | Non-provisional of | 60/221,366 | Jul. 27, 2000 |
| PCT/US00/30036 | Non-provisional of | 60/163,576 | Nov. 05, 1999 |
| 10/100,683 | Continuation-in-part of | PCT/US00/30039 | Nov. 01, 2000 |
| PCT/US00/30039 | Non-provisional of | 60/221,367 | Jul. 27, 2000 |
| PCT/US00/30039 | Non-provisional of | 60/195,296 | Apr. 07, 2000 |
| PCT/US00/30039 | Non-provisional of | 60/164,344 | Nov. 09, 1999 |
| 10/100,683 | Continuation-in-part of | PCT/US00/30654 | Nov. 08, 2000 |
| PCT/US00/30654 | Non-provisional of | 60/221,142 | Jul. 27, 2000 |
| PCT/US00/30654 | Non-provisional of | 60/164,835 | Nov. 12, 1999 |
| 10/100,683 | Continuation-in-part of | PCT/US00/30628 | Nov. 08, 2000 |
| PCT/US00/30628 | Non-provisional of | 60/215,140 | Jun. 30, 2000 |
| PCT/US00/30628 | Non-provisional of | 60/164,744 | Nov. 12, 1999 |
| 10/100,683 | Continuation-in-part of | PCT/US00/30653 | Nov. 08, 2000 |
| PCT/US00/30653 | Non-provisional of | 60/221,193 | Jul. 27, 2000 |
| PCT/US00/30653 | Non-provisional of | 60/164,735 | Nov. 12, 1999 |
| 10/100,683 | Continuation-in-part of | PCT/US00/30629 | Nov. 08, 2000 |
| PCT/US00/30629 | Non-provisional of | 60/222,904 | Aug. 03, 2000 |
| PCT/US00/30629 | Non-provisional of | 60/164,825 | Nov. 12, 1999 |
| 10/100,683 | Continuation-in-part of | PCT/US00/30679 | Nov. 08, 2000 |
| PCT/US00/30679 | Non-provisional of | 60/224,007 | Aug. 04, 2000 |
| PCT/US00/30679 | Non-provisional of | 60/164,834 | Nov. 12, 1999 |
| 10/100,683 | Continuation-in-part of | PCT/US00/30674 | Nov. 08, 2000 |
| PCT/US00/30674 | Non-provisional of | 60/215,128 | Jun. 30, 2000 |
| PCT/US00/30674 | Non-provisional of | 60/164,750 | Nov. 12, 1999 |
| 10/100,683 | Continuation-in-part of | PCT/US00/31162 | Nov. 15, 2000 |
| PCT/US00/31162 | Non-provisional of | 60/215,136 | Jun. 30, 2000 |
| PCT/US00/31162 | Non-provisional of | 60/166,415 | Nov. 19, 1999 |
| 10/100,683 | Continuation-in-part of | PCT/US00/31282 | Nov. 15, 2000 |
| PCT/US00/31282 | Non-provisional of | 60/219,665 | Jul. 21, 2000 |
| PCT/US00/31282 | Non-provisional of | 60/166,414 | Nov. 19, 1999 |
| 10/100,683 | Continuation-in-part of | PCT/US00/30657 | Nov. 08, 2000 |
| PCT/US00/30657 | Non-provisional of | 60/215,132 | Jun. 30, 2000 |
| PCT/US00/30657 | Non-provisional of | 60/164,731 | Nov. 12, 1999 |
| 10/100,683 | Continuation-in-part of | PCT/US01/01396 | Jan. 17, 2001 |
| PCTUS01/01396 | Non-provisional of | 60/256,968 | Dec. 21, 2000 |
| PCTUS01/01396 | Non-provisional of | 60/226,280 | Aug. 18, 2000 |
| 10/100,683 | Continuation-in-part of | PCT/US01/01387 | Jan. 17, 2001 |
| PCTUS01/01387 | Non-provisional of | 60/259,803 | Jan. 05, 2001 |
| PCTUS01/01387 | Non-provisional of | 60/226,380 | Aug. 18, 2000 |
| 10/100,683 | Continuation-in-part of | PCT/US01/01567 | Jan. 17, 2001 |
| PCT/US01/01567 | Non-provisional of | 60/228,084 | Aug. 28, 2000 |
| 10/100,683 | Continuation-in-part of | PCT/US01/01431 | Jan. 17, 2001 |
| PCT/US01/01431 | Non-provisional of | 60/231,968 | Sep. 12, 2000 |
| PCT/US01/01431 | Continuation-in-part of | 09/915,582 | Jul. 27, 2001 |
| 10/100,683 | Continuation-in-part of | PCT/US01/01432 | Jan. 17, 2001 |
| PCT/US01/01432 | Non-provisional of | 60/236,326 | Sep. 29, 2000 |
| 10/100,683 | Continuation-in-part of | PCT/US01/00544 | Jan. 09, 2001 |
| PCT/US01/00544 | Non-provisional of | 60/234,211 | Sep. 20, 2000 |
| 10/100,683 | Continuation-in-part of | PCT/US01/01435 | Jan. 17, 2001 |
| PCT/US01/01435 | Non-provisional of | 60/226,282 | Aug. 18, 2000 |
| 10/100,683 | Continuation-in-part of | PCT/US01/01386 | Jan. 17, 2001 |
| PCT/US01/01386 | Non-provisional of | 60/232,104 | Sep. 12, 2000 |
| 10/100,683 | Continuation-in-part of | PCT/US01/01565 | Jan. 17, 2001 |
| PCT/US01/01565 | Non-provisional of | 60/234,210 | Sep. 20, 2000 |
| 10/100,683 | Continuation-in-part of | PCT/US01/01394 | Jan. 17, 2001 |
| PCT/US01/01394 | Non-provisional of | 60/259,805 | Jan. 05, 2001 |
| PCT/US01/01394 | Non-provisional of | 60/226,278 | Aug. 18, 2000 |
| 10/100,683 | Continuation-in-part of | PCT/US01/01434 | Jan. 17, 2001 |
| PCT/US01/01434 | Non-provisional of | 60/259,678 | Jan. 05, 2001 |
| PCT/US01/01434 | Non-provisional of | 60/226,279 | Aug. 18, 2000 |
| 10/100,683 | Continuation-in-part of | PCT/US01/01397 | Jan. 17, 2001 |
| PCT/US01/01397 | Non-provisional of | 60/226,281 | Aug. 18, 2000 |
| 10/100,683 | Continuation-in-part of | PCT/US01/01385 | Jan. 17, 2001 |
| PCT/US01/01385 | Non-provisional of | 60/231,969 | Sep. 12, 2000 |
| 10/100,683 | Continuation-in-part of | PCT/US01/01384 | Jan. 17, 2001 |
| PCT/US01/01384 | Non-provisional of | 60/259,516 | Jan. 04, 2001 |
| PCT/US01/01384 | Non-provisional of | 60/228,086 | Aug. 28, 2000 |
| 10/100,683 | Continuation-in-part of | PCT/US01/01383 | Jan. 17, 2001 |
| PCT/US01/01383 | Non-provisional of | 60/259,804 | Jan. 05, 2001 |
| PCT/US01/01383 | Non-provisional of | 60/228,083 | Aug. 28, 2000 |
| 10/100,683 | Continuation-in-part of | PCT/US02/05064 | Feb. 21, 2002 |
| PCT/US02/05064 | Non-provisional of | 60/304,444 | Jul. 12, 2001 |
| PCT/US02/05064 | Non-provisional of | 60/270,658 | Feb. 23, 2001 |
| 10/100,683 | Continuation-in-part of | PCT/US02/05301 | Feb. 21, 2002 |
| PCT/US02/05301 | Non-provisional of | 60/304,417 | Jul. 12, 2001 |
| PCT/US02/05301 | Non-provisional of | 60/270,625 | Feb. 23, 2001 |
| 10/100,683 | Non-provisional of | 60/304,121 | Jul. 11, 2001 |
| 10/100,683 | Non-provisional of | 60/295,869 | Jun. 06, 2001 |
| 10/100,683 | Non-provisional of | 60/325,209 | Sep. 28, 2001 |
| 10/100,683 | Non-provisional of | 60/311,085 | Aug. 10, 2001 |
| 10/100,683 | Non-provisional of | 60/330,629 | Oct. 26, 2001 |
| 10/100,683 | Non-provisional of | 60/331,046 | Nov. 07, 2001 |
| 10/100,683 | Non-provisional of | 60/358,554 | Feb. 22, 2002 |
| 10/100,683 | Non-provisional of | 60/358,714 | Feb. 25, 2002 |

wherein each of the above applications are all herein incorporated by reference in their entirety.

### REFERENCE TO SEQUENCE LISTING ON COMPACT DISC

[0002] This application refers to a “Sequence Listing” listed below, which is provided as an electronic document on two identical compact discs (CD-R), labeled “Copy 1” and “Copy 2.” These compact discs each contain the file “PS903P1 Sequence Listing.txt” (created Feb. 8, 2006, byte size=1,342,657 bytes), which is hereby incorporated by reference in its entirety.

### FIELD OF THE INVENTION

[0003] The present invention relates to human secreted proteins/polypeptides, and isolated nucleic acid molecules encoding said proteins/polypeptides, useful for detecting, preventing, diagnosing, prognosticating, treating, and/or ameliorating allergic and asthmatic diseases and disorders. Antibodies that bind these polypeptides are also encompassed by the present invention. Also encompassed by the invention are vectors, host cells, and recombinant and synthetic methods for producing said polynucleotides, polypeptides, and/or antibodies. The invention further encompasses screening methods for identifying agonists and antagonists of polynucleotides and polypeptides of the invention. The present invention further encompasses methods and compositions for inhibiting or enhancing the production and function of the polypeptides of the present invention.

### BACKGROUND OF THE INVENTION

[0004] The immune system is an intricate network of cells, tissues and soluble molecules that function to protect the body from invasion by foreign substances and pathogens. The major cells of the immune system are lymphocytes, including B cells and T cells, and myeloid cells, including basophils, eosinophils, neutrophils, mast cells, monocytes, macrophages and dendritic cells. In addition to these cellular components of the immune system, soluble molecules—such as antibodies, complement proteins, and cytokines—circulate in lymph and blood plasma, and play important roles in immunity.

[0005] The immune system can be subdivided into the acquired and innate immune systems. The cells of the innate immune system (e.g., neutrophils, eosinophils, basophils, mast cells) are not antigen specific and their action is not enhanced by repeated exposure to the same antigen. The cells of the acquired immune system (B and T cells) are antigen specific. Repeated exposure of B and T cells to an antigen results in improved immune responses (memory responses) produced by these cell types. The cells and products of the acquired immune system can recruit components of the innate system to mount a focused immune response. For a more extensive review of the immune system, see Fundamental Immunology, 4th edition, Ed. William Paul, Lippincott-Raven Pub. (1998).

[0006] An immune response is seldom carried out by a single cell type, but rather requires the coordinated efforts of several cell types. In order to coordinate an immune response, it is necessary that cells of the immune system communicate with each other and with other cells of the body. Communication between cells may be made by cell-cell contact, between membrane bound molecules on each cell, or by the interaction of soluble components of the immune system with cellular receptors. Signaling between cell types may have one or more of a variety of consequences, including activation, proliferation, differentiation, and apoptosis. Activation and differentiation of immune cells may result in the expression or secretion of polypeptides, or other molecules, which in turn affect the function of other cells and/or molecules of the immune system.

[0007] The genes and proteins associated with this coordinated immune response are essential for the proper regulation and functioning of the immune system. Dysregulation of immune system-related genes and proteins may result in a variety of diseases and/or disorders, including immediate hypersensitivity diseases. Immediate hypersensitivity diseases, such as asthma, hay fever, and allergic conjunctivitis, are characterized by similar physiological mechanisms and generally are initiated by environmental antigens (e.g. pollen, dust, or molds). Patients suffering from the effects of these disorders are predisposed to react to specific external antigens. When these antigens contact certain tissues, such as ocular, nasal, or lung tissues, those tissues initiate an immune response and produce undesirable and frequently life-threatening symptoms. Over 35 million Americans suffer from allergic disorders, such as seasonal allergic rhinitis (hay fever), and asthma affects about 10 million Americans. These conditions are not only becoming more common but also more serious, with more people being hospitalized.

[0008] Molecules that stimulate or suppress immune system function are known as immunomodulators. These molecules, which include endogenous proteins (e.g., cytokines, cytokine receptors, and intracellular signal transduction molecules), molecules derived from microorganisms, and synthetic agents, may exert their modulatory effects at one or more stages of the immune response, such as antigen recognition, stimulation of cytokine production and release, and/or activation/differentiation of lymphocytes and myeloid cells. Immunomodulators may enhance (immunoprophylaxis, immunostimulation), restore (immunosubstitution, immunorestoration) or suppress (immunosuppression, immunodeviation) immunological functions or activities.

[0009] Immunomodulatory compounds have many important applications in clinical practice. For example, immunosuppressing agents (which attenuate or prevent unwanted immune responses) can be used to prevent immediate hypersensitivity reactions such as asthma and allergic reactions. A mechanism of action common to many immunosuppressants is the inhibition of T cell activation and/or differentiation. Antilymphocyte antibodies have also been used to attenuate immune system functions. Currently used immunosuppressive agents can produce a number of side effects, which limit their use. Among the most serious secondary effects include kidney and liver toxicity, increased risk of infection, hyperglycemia, neoplasia, and osteoporosis (see, e.g., Freeman, Clin. Biochem. 24(1):9-14 (1991); Mitchison, Dig. Dis. 11(2):78-101 (1993)). The discovery of new human allergy and/or asthma related polynucleotides, the polypeptides encoded by them, and antibodies that specifically bind these polypeptides, satisfies a need in the art by providing new compositions that are useful in the diagnosis, treatment, prevention and/or prognosis of disorders of the immune system, including, but not limited to, allergic reactions and conditions, asthma, and related immediate hypersensitivity disorders.

### SUMMARY OF THE INVENTION

[0010] The present invention encompasses human secreted proteins/polypeptides, and isolated nucleic acid molecules encoding said proteins/polypeptides, useful for detecting, preventing, diagnosing, prognosticating, treating, and/or ameliorating allergic and asthmatic diseases and disorders. Antibodies that bind these polypeptides are also encompassed by the present invention; as are vectors, host cells, and recombinant and synthetic methods for producing said polynucleotides, polypeptides, and/or antibodies. The invention further encompasses screening methods for identifying agonists and antagonists of polynucleotides and polypeptides of the invention. The present invention also encompasses methods and compositions for inhibiting or enhancing the production and function of the polypeptides of the present invention.

### DETAILED DESCRIPTION

Polynucleotides and Polypeptides of the Invention

Description of Table 1A

[0011] Table 1A summarizes information concerning certain polypnucleotides and polypeptides of the invention. The first column provides the gene number in the application for each clone identifier. The second column provides a unique clone identifier, “Clone ID:”, for a cDNA clone related to each contig sequence disclosed in Table 1A Third column, the cDNA Clones identified in the second column were deposited as indicated in the third column (i.e. by ATCC™ Deposit No:Z and deposit date). Some of the deposits contain multiple different clones corresponding to the same gene. In the fourth column, “Vector” refers to the type of vector contained in the corresponding cDNA Clone identified in the second column. In the fifth column, the nucleotide sequence identified as “NT SEQ ID NO:X” was assembled from partially homologous (“overlapping”) sequences obtained from the corresponding cDNA clone identified in the second column and, in some cases, from additional related cDNA clones. The overlapping sequences were assembled into a single contiguous sequence of high redundancy (usually three to five overlapping sequences at each nucleotide position), resulting in a final sequence identified as SEQ ID NO:X. In the sixth column, “Total NT Seq.” refers to the total number of nucleotides in the contig sequence identified as SEQ ID NO:X.” The deposited clone may contain all or most of these sequences, reflected by the nucleotide position indicated as “5′ NT of Clone Seq.” (seventh column) and the “3′ NT of Clone Seq.” (eighth column) of SEQ ID NO:X. In the ninth column, the nucleotide position of SEQ ID NO:X of the putative start codon (methionine) is identified as “5′ NT of Start Codon.” Similarly, in column ten, the nucleotide position of SEQ ID NO:X of the predicted signal sequence is identified as “5′ NT of First AA of Signal Pep.” In the eleventh column, the translated amino acid sequence, beginning with the methionine, is identified as “AA SEQ ID NO:Y,” although other reading frames can also be routinely translated using known molecular biology techniques. The polypeptides produced by these alternative open reading frames are specifically contemplated by the present invention.

[0012] In the twelfth and thirteenth columns of Table 1A, the first and last amino acid position of SEQ ID NO:Y of the predicted signal peptide is identified as “First AA of Sig Pep” and “Last AA of Sig Pep.” In the fourteenth column, the predicted first amino acid position of SEQ ID NO:Y of the secreted portion is identified as “Predicted First AA of Secreted Portion”. The amino acid position of SEQ ID NO:Y of the last amino acid encoded by the open reading frame is identified in the fifteenth column as “Last AA of ORF”.

[0013] SEQ ID NO:X (where X may be any of the polynucleotide sequences disclosed in the sequence listing) and the translated SEQ ID NO:Y (where Y may be any of the polypeptide sequences disclosed in the sequence listing) are sufficiently accurate and otherwise suitable for a variety of uses well known in the art and described further below. For instance, SEQ ID NO:X is useful for designing nucleic acid hybridization probes that will detect nucleic acid sequences contained in SEQ ID NO:X or the cDNA contained in the deposited clone. These probes will also hybridize to nucleic acid molecules in biological samples, thereby enabling a variety of forensic and diagnostic methods of the invention. Similarly, polypeptides identified from SEQ ID NO:Y may be used, for example, to generate antibodies which bind specifically to proteins containing the polypeptides and the secreted proteins encoded by the cDNA clones identified in Table 1A and/or elsewhere herein

[0014] Nevertheless, DNA sequences generated by sequencing reactions can contain sequencing errors. The errors exist as misidentified nucleotides, or as insertions or deletions of nucleotides in the generated DNA sequence. The erroneously inserted or deleted nucleotides cause frame shifts in the reading frames of the predicted amino acid sequence. In these cases, the predicted amino acid sequence diverges from the actual amino acid sequence, even though the generated DNA sequence may be greater than 99.9% identical to the actual DNA sequence (for example, one base insertion or deletion in an open reading frame of over 1000 bases).

[0015] Accordingly, for those applications requiring precision in the nucleotide sequence or the amino acid sequence, the present invention provides not only the generated nucleotide sequence identified as SEQ ID NO:X, and the predicted translated amino acid sequence identified as SEQ ID NO:Y, but also a sample of plasmid DNA containing a human cDNA of the invention deposited with the ATCC™, as set forth in Table 1A. The nucleotide sequence of each deposited plasmid can readily be determined by sequencing the deposited plasmid in accordance with known methods

[0016] The predicted amino acid sequence can then be verified from such deposits. Moreover, the amino acid sequence of the protein encoded by a particular plasmid can also be directly determined by peptide sequencing or by expressing the protein in a suitable host cell containing the deposited human cDNA, collecting the protein, and determining its sequence.

[0017] Also provided in Table 1A is the name of the vector which contains the cDNA plasmid. Each vector is routinely used in the art. The following additional information is provided for convenience.

[0018] Vectors Lambda Zap (U.S. Pat. Nos. 5,128,256 and 5,286,636), Uni-Zap XR (U.S. Pat. Nos. 5,128,256 and 5,286,636), Zap Express (U.S. Pat. Nos. 5,128,256 and 5,286,636), pBLUESCRIPT™ (pBS) (Short, J. M. et al., Nucleic Acids Res. 16:7583-7600 (1988); Alting-Mees, M. A and Short J. M., Nucleic Acids Res. 17:9494 (1989)) and pBK (Alting-Mees, M. A. et al., Strategies 5:58-61 (1992)) are commercially available from Stratagene Cloning Systems, Inc., 11011 N. Torrey Pines Road, La Jolla, Calif., 92037. pBS contains an ampicillin resistance gene and pBK contains a neomycin resistance gene. Phagemid pBS may be excised from the Lambda Zap and Uni-Zap XR vectors, and phagemid pBK may be excised from the Zap Express vector. Both phagemids may be transformed into E. coli strain XL-1 Blue, also available from STRATAGENE™.

[0019] Vectors pSport1, pCMVSport 1.0, pCMVSport 2.0 and pCMVSport 3.0, were obtained from Life Technologies, Inc., P.O. Box 6009, Gaithersburg, Md. 20897. All Sport vectors contain an ampicillin resistance gene and may be transformed into E. coli strain DH10B, also available from LIFE TECHNOLOGIES™. See, for instance, Gruber, C. E., et al., Focus 15:59 (1993). Vector lafmid BA (Bento Soares, Columbia University, New York, N.Y.) contains an ampicillin resistance gene and can be transformed into E. coli strain XL-1 Blue. Vector pCR®2.1, which is available from Invitrogen, 1600 Faraday Avenue, Carlsbad, Calif. 92008, contains an ampicillin resistance gene and may be transformed into E. coli strain DH10B, available from LIFE TECHNOLOGIES™. See, for instance, Clark, J. M., Nuc. Acids Res. 16:9677-9686 (1988) and Mead, D. et al., Bio/Technology 9: (1991).

[0020] The present invention also relates to the genes corresponding to SEQ ID NO:X, SEQ ID NO:Y, and/or a deposited cDNA (cDNA Clone ID). The corresponding gene can be isolated in accordance with known methods using the sequence information disclosed herein. Such methods include, but are not limited to, preparing probes or primers from the disclosed sequence and identifying or amplifying the corresponding gene from appropriate sources of genomic material.

[0021] Also provided in the present invention are allelic variants, orthologs, and/or species homologs. Procedures known in the art can be used to obtain full-length genes, allelic variants, splice variants, full-length coding portions, orthologs, and/or species homologs of genes corresponding to SEQ ID NO:X and SEQ ID NO:Y using information from the sequences disclosed herein or the clones deposited with the ATCC™. For example, allelic variants and/or species homologs may be isolated and identified by making suitable probes or primers from the sequences provided herein and screening a suitable nucleic acid source for allelic variants and/or the desired homologue.

[0022] The present invention provides a polynucleotide comprising, or alternatively consisting of, the nucleic acid sequence of SEQ ID NO:X and/or a cDNA contained in ATCC™ Deposit No. Z. The present invention also provides a polypeptide comprising, or alternatively, consisting of, the polypeptide sequence of SEQ ID NO:Y, a polypeptide encoded by SEQ ID NO:X and/or a polypeptide encoded by a cDNA contained in ATCC™ deposit No. Z. Polynucleotides encoding a polypeptide comprising, or alternatively consisting of the polypeptide sequence of SEQ ID NO:Y, a polypeptide encoded by SEQ ID NO:X and/or a polypeptide encoded by the cDNA contained in ATCC™ Deposit No. Z, are also encompassed by the invention. The present invention further encompasses a polynucleotide comprising, or alternatively consisting of the complement of the nucleic acid sequence of SEQ ID NO:X, and/or the complement of the coding strand of the cDNA contained in ATCC™ Deposit No. Z.

Description of Table 1B (Comprised of Tables 1B.1 and 1B.2)

[0023] Table 1B.1 and Table 1B.2 summarize some of the polynucleotides encompassed by the invention (including cDNA clones related to the sequences (Clone ID:), contig sequences (contig identifier (Contig ID:) and contig nucleotide sequence identifiers (SEQ ID NO:X)) and further summarizes certain characteristics of these polynucleotides and the polypeptides encoded thereby. The first column of Tables 1B.1 and 1B.2 provide the gene numbers in the application for each clone identifier. The second column of Tables 1B.1 and 1B.2 provide unique clone identifiers, “Clone ID:”, for cDNA clones related to each contig sequence disclosed in Table 1A and/or Table 1B. The third column of Tables 1B.1 and 1B.2 provide unique contig identifiers, “Contig ID:” for each of the contig sequences disclosed in these tables. The fourth column of Tables 1B.1 and 1B.2 provide the sequence identifiers, “SEQ ID NO:X”, for each of the contig sequences disclosed in Table 1A and/or 1B.

Table 1B.1

[0024] The fifth column of Table 1B.1, “ORF (From-To)”, provides the location (i.e., nucleotide position numbers) within the polynucleotide sequence of SEQ ID NO:X that delineates the preferred open reading frame (ORF) that encodes the amino acid sequence shown in the sequence listing and referenced in Table 1B.1 as SEQ ID NO:Y (column 6). Column 7 of Table 1B.1 lists residues comprising predicted epitopes contained in the polypeptides encoded by each of the preferred ORFs (SEQ ID NO:Y). Identification of potential immunogenic regions was performed according to the method of Jameson and Wolf (CABIOS, 4; 181-186 (1988)); specifically, the Genetics Computer Group (GCG) implementation of this algorithm, embodied in the program PEPTIDESTRUCTURE (Wisconsin Package v10.0, Genetics Computer Group (GCG), Madison, Wis.). This method returns a measure of the probability that a given residue is found on the surface of the protein. Regions where the antigenic index score is greater than 0.9 over at least 6 amino acids are indicated in Table 1B.1 as “Predicted Epitopes”. In particular embodiments, polypeptides of the invention comprise, or alternatively consist of, one, two, three, four, five or more of the predicted epitopes described in Table 1B.1. It will be appreciated that depending on the analytical criteria used to predict antigenic determinants, the exact address of the determinant may vary slightly. Column 8 of Table 1B.1 (“Tissue Distribution”) is described below in Table 1B.2 Column 5. Column 9 of Table 1B.1 (“Cytologic Band”) provides the chromosomal location of polynucleotides corresponding to SEQ ID NO:X. Chromosomal location was determined by finding exact matches to EST and cDNA sequences contained in the NCBI (National Center for Biotechnology Information) UniGene database. Given a presumptive chromosomal location, disease locus association was determined by comparison with the Morbid Map, derived from Online Mendelian Inheritance in Man (Online Mendelian Inheritance in Man, OMIM™. McKusick-Nathans Institute for Genetic Medicine, Johns Hopkins University (Baltimore, Md.) and National Center for Biotechnology Information, National Library of Medicine (Bethesda, Md.) 2000. World Wide Web URL: http://www.ncbi.nlm.nih.gov/omim/). If the putative chromosomal location of the Query overlaps with the chromosomal location of a Morbid Map entry, an OMIM identification number is disclosed in Table 1B.1, column 9 labeled “OMIM Disease Reference(s)”. A key to the OMIM reference identification numbers is provided in Table 5. Table 1B.2

[0025] Column 5 of Table 1B.2, “Tissue Distribution” shows the expression profile of tissue, cells, and/or cell line libraries which express the polynucleotides of the invention. The first code number shown in Table 1B.2 column 5 (preceding the colon), represents the tissue/cell source identifier code corresponding to the key provided in Table 4. Expression of these polynucleotides was not observed in the other tissues and/or cell libraries tested. The second number in column 5 (following the colon), represents the number of times a sequence corresponding to the reference polynucleotide sequence (e.g., SEQ ID NO:X) was identified in the corresponding tissue/cell source. Those tissue/cell source identifier codes in which the first two letters are “AR” designate information generated using DNA array technology. Utilizing this technology, cDNAs were amplified by PCR and then transferred, in duplicate, onto the array. Gene expression was assayed through hybridization of first strand cDNA probes to the DNA array. cDNA probes were generated from total RNA extracted from a variety of different tissues and cell lines. Probe synthesis was performed in the presence of ³³P dCTP, using oligo(dT) to prime reverse transcription. After hybridization, high stringency washing conditions were employed to remove non-specific hybrids from the array. The remaining signal, emanating from each gene target, was measured using a Phosphorimager. Gene expression was reported as Phosphor Stimulating Luminescence (PSL) which reflects the level of phosphor signal generated from the probe hybridized to each of the gene targets represented on the array. A local background signal subtraction was performed before the total signal generated from each array was used to normalize gene expression between the different hybridizations. The value presented after “[array code]:” represents the mean of the duplicate values, following background subtraction and probe normalization. One of skill in the art could routinely use this information to identify normal and/or diseased tissue(s) which show a predominant expression pattern of the corresponding polynucleotide of the invention or to identify polynucleotides which show predominant and/or specific tissue and/or cell expression.

Description of Table 1C

[0026] Table 1C summarizes additional polynucleotides encompassed by the invention (including cDNA clones related to the sequences (Clone ID:), contig sequences (contig identifier (Contig ID:) contig nucleotide sequence identifiers (SEQ ID NO:X)), and genomic sequences (SEQ ID NO:B). The first column provides a unique clone identifier, “Clone ID:”, for a cDNA clone related to each contig sequence. The second column provides the sequence identifier, “SEQ ID NO:X”, for each contig sequence. The third column provides a unique contig identifier, “Contig ID:” for each contig sequence. The fourth column, provides a BAC identifier “BAC ID NO:A” for the BAC clone referenced in the corresponding row of the table. The fifth column provides the nucleotide sequence identifier, “SEQ ID NO:B” for a fragment of the BAC clone identified in column four of the corresponding row of the table. The sixth column, “Exon From-To”, provides the location (i.e., nucleotide position numbers) within the polynucleotide sequence of SEQ ID NO:B which delineate certain polynucleotides of the invention that are also exemplary members of polynucleotide sequences that encode polypeptides of the invention (e.g., polypeptides containing amino acid sequences encoded by the polynucleotide sequences delineated in column six, and fragments and variants thereof).

Description of Tables 1D.1 and 1D.2

[0027] Tables 1D.1 and 1D.2: In preferred embodiments, the present invention encompasses a method of detecting, preventing, diagnosing, prognosticating, treating, and/or ameliorating allergic and/or asthmatic diseases and disorders; comprising administering to a patient in which such treatment, prevention, or amelioration is desired a protein, nucleic acid, or antibody of the invention (or fragment or variant thereof) represented by Table 1A, Table 1B, and Table 1C, in an amount effective to detect, prevent, diagnose, prognosticate, treat, and/or ameliorate the disease or disorder.

[0028] As indicated in Tables 1D.1 and 1D.2, the polynucleotides, polypeptides, agonists, or antagonists of the present invention (including antibodies) can be used in assays to test for one or more biological activities. If these polynucleotides and polypeptides do exhibit activity in a particular assay, it is likely that these molecules may be involved in the diseases associated with the biological activity. Thus, the polynucleotides or polypeptides, or agonists or antagonists thereof (including antibodies) could be used to treat the associated disease.

[0029] Tables 1D.1 and 1D.2 provide information related to biological activities for polynucleotides and polypeptides of the invention (including antibodies, agonists, and/or antagonists thereof). Tables 1D.1 and 1D.2 also provide information related to assays which may be used to test polynucleotides and polypeptides of the invention (including antibodies, agonists, and/or antagonists thereof) for the corresponding biological activities. The first column (“Gene No.”) provides the gene number in the application for each clone identifier. The second column (“cDNA Clone ID:”) provides the unique clone identifier for each clone as previously described and indicated in Tables 1A, 1B, and 1C. The third column (“AA SEQ ID NO:Y”) indicates the Sequence Listing SEQ ID Number for polypeptide sequences encoded by the corresponding cDNA clones (also as indicated in Tables 1A, 1B, and 2). The fourth column (“Biological Activity”) indicates a biological activity corresponding to the indicated polypeptides (or polynucleotides encoding said polypeptides). The fifth column (“Exemplary Activity Assay”) further describes the corresponding biological activity and provides information pertaining to the various types of assays that may be performed to test, demonstrate, or quantify the corresponding biological activity. Tables 1D.1 and 1D.2 describe the use of FMAT technology, inter alia, for testing or demonstrating various biological activities. Fluorometric microvolume assay technology (FMAT) is a fluorescence-based system that provides a means to perform nonradioactive cell- and bead-based assays to detect activation of cell signal transduction pathways. This technology was designed specifically for ligand binding and immunological assays. Using this technology, fluorescent cells or beads at the bottom of the well are detected as localized areas of concentrated fluorescence using a data processing system. Unbound flurophore comprising the background signal is ignored, allowing for a wide variety of homogeneous assays. FMAT technology may be used for peptide ligand binding assays, immunofluorescence, apoptosis, cytotoxicity, and bead-based immunocapture assays. See, Miraglia S et. al., “Homogeneous cell and bead based assays for highthroughput screening using flourometric microvolume assay technology,” Journal of Biomolecular Screening; 4:193-204 (1999). In particular, FMAT technology may be used to test, confirm, and/or identify the ability of polypeptides (including polypeptide fragments and variants) to activate signal transduction pathways. For example, FMAT technology may be used to test, confirm, and/or identify the ability of polypeptides to upregulate production of immunomodulatory proteins (such as, for example, interleukins, GM-CSF, Rantes, and Tumor Necrosis factors, as well as other cellular regulators (e.g. insulin)).

[0030] Tables 1D.1 and 1D.2 also describe the use of kinase assays for testing, demonstrating, or quantifying biological activity. In this regard, the phosphorylation and de-phosphorylation of specific amino acid residues (e.g. Tyrosine, Serine, Threonine) on cell-signal transduction proteins provides a fast, reversible means for activation and de-activation of cellular signal transduction pathways. Moreover, cell signal transduction via phosphorylation/de-phosphorylation is crucial to the regulation of a wide variety of cellular processes (e.g. proliferation, differentiation, migration, apoptosis, etc.). Accordingly, kinase assays provide a powerful tool useful for testing, confirming, and/or identifying polypeptides (including polypeptide fragments and variants) that mediate cell signal transduction events via protein phosphorylation. See e.g., Forrer, P., Tamaskovic R., and Jaussi, R. “Enzyme-Linked Immunosorbent Assay for Measurement of JNK, ERK, and p38 Kinase Activities” Biol. Chem. 379(8-9): 1101-1110 (1998).

Description of Table 1E

[0031] Polynucleotides encoding polypeptides of the present invention can be used in assays to test for one or more biological activities. One such biological activity which may be tested includes the ability of polynucleotides and polypeptides of the invention to stimulate up-regulation or down-regulation of expression of particular genes and proteins. Hence, if polynucleotides and polypeptides of the present invention exhibit activity in altering particular gene and protein expression patterns, it is likely that these polynucleotides and polypeptides of the present invention may be involved in, or capable of effecting changes in, diseases associated with the altered gene and protein expression profiles. Hence, polynucleotides, polypeptides, or antibodies of the present invention could be used to treat said associated diseases.

[0032] TaqMan® assays may be performed to assess the ability of polynucleotides (and polypeptides they encode) to alter the expression pattern of particular “target” genes. TaqMan® reactions are performed to evaluate the ability of a test agent to induce or repress expression of specific genes in different cell types. TaqMan® gene expression quantification assays (“TaqMan® assays”) are well known to, and routinely performed by, those of ordinary skill in the art. TaqMan® assays are performed in a two step reverse transcription/polymerase chain reaction (RT-PCR). In the first (RT) step, cDNA is reverse transcribed from total RNA samples using random hexamer primers. In the second (PCR) step, PCR products are synthesized from the cDNA using gene specific primers.

[0033] To quantify gene expression the Taqman® PCR reaction exploits the 5′ nuclease activity of AmpliTaq Gold® DNA Polymerase to cleave a Taqman® probe (distinct from the primers) during PCR. The Taqman® probe contains a reporter dye at the 5′-end of the probe and a quencher dye at the 3′ end of the probe. When the probe is intact, the proximity of the reporter dye to the quencher dye results in suppression of the reporter fluorescence. During PCR, if the target of interest is present, the probe specifically anneals between the forward and reverse primer sites. AmpliTaq Fold DNA Polymerase then cleaves the probe between the reporter and quencher when the probe hybridizes to the target, resulting in increased fluorescence of the reporter (see FIG. 2). Accumulation of PCR products is detected directly by monitoring the increase in fluorescence of the reporter dye.

[0034] After the probe fragments are displaced from the target, polymerization of the strand continues. The 3′-end of the probe is blocked to prevent extension of the probe during PCR. This process occurs in every cycle and does not interfere with the exponential accumulation of product. The increase in fluorescence signal is detected only if the target sequence is complementary to the probe and is amplified during PCR. Because of these requirements, any nonspecific amplification is not detected.

[0035] For test sample preparation, vector controls or constructs containing the coding sequence for the gene of interest are transfected into cells, such as for example 293T cells, and supernatants collected after 48 hours. For cell treatment and RNA isolation, multiple primary human cells or human cell lines are used; such cells may include but are not limited to, Normal Human Dermal Fibroblasts, Aortic Smooth Muscle, Human Umbilical Vein Endothelial Cells, HepG2, Daudi, Jurkat, U937, Caco, and THP-1 cell lines. Cells are plated in growth media and growth is arrested by culturing without media change for 3 days, or by switching cells to low serum media and incubating overnight. Cells are treated for 1, 6, or 24 hours with either vector control supernatant or sample supernatant (or purified/partially purified protein preparations in buffer). Total RNA is isolated; for example, by using Trizol extraction or by using the Ambion RNAqueous™-4PCR RNA isolation system. Expression levels of multiple genes are analyzed using TAQMAN, and expression in the test sample is compared to control vector samples to identify genes induced or repressed. Each of the above described techniques are well known to, and routinely performed by, those of ordinary skill in the art.

[0036] Table 1E indicates particular disease classes and preferred indications for which polynucleotides, polypeptides, or antibodies of the present invention may be used in detecting, diagnosing, preventing, treating and/or ameliorating said diseases and disorders based on “target” gene expression patterns which may be up- or down-regulated by polynucleotides (and the encoded polypeptides) corresponding to each indicated cDNA Clone ID (shown in Table 1E, Column 2).

[0037] Thus, in preferred embodiments, the present invention encompasses a method of detecting, diagnosing, preventing, treating, and/or ameliorating a disease or disorder listed in the “Disease Class” and/or “Preferred Indication” columns of Table 1E; comprising administering to a patient in which such detection, diagnosis, prevention, or treatment is desired a protein, nucleic acid, or antibody of the invention (or fragment or variant thereof) in an amount effective to detect, diagnose, prevent, treat, or ameliorate the disease or disorder. The first and second columns of Table 1D.1 show the “Gene No.” and “cDNA Clone ID No.”, respectively, indicating certain nucleic acids and proteins (or antibodies against the same) of the invention (including polynucleotide, polypeptide, and antibody fragments or variants thereof) that may be used in detecting, diagnosing, preventing, treating, or ameliorating the disease(s) or disorder(s) indicated in column 6 and as indicated in the corresponding row in the “Disease Class” or “Preferred Indication” Columns of Table 1E.

[0038] In another embodiment the present invention also encompasses methods of detecting, diagnosing, preventing, treating, or ameliorating a disease or disorder listed in the “Disease Class” or “Preferred Indication” Columns of Table 1E; comprising administering to a patient combinations of the proteins, nucleic acids, or antibodies of the invention (or fragments or variants thereof), sharing similar indications as shown in the corresponding rows in the “Disease Class” or “Preferred Indication” Columns of Table 1E.

[0039] The “Disease Class” Column of Table 1E provides a categorized descriptive heading for diseases, disorders, and/or conditions (more fully described below) that may be detected, diagnosed, prevented, treated, or ameliorated by a protein, nucleic acid, or antibody of the invention (or fragment or variant thereof).

[0040] The “Preferred Indication” Column of Table 1E describes diseases, disorders, and/or conditions that may be detected, diagnosed, prevented, treated, or ameliorated by a protein, nucleic acid, or antibody of the invention (or fragment or variant thereof).

[0041] The “Cell Line” and “Exemplary Targets” Columns of Table 1E indicate particular cell lines and target genes, respectively, which may show altered gene expression patterns (i.e., up- or down-regulation of the indicated target gene) in Taqman assays, performed as described above, utilizing polynucleotides of the cDNA Clone ID shown in the corresponding row. Alteration of expression patterns of the indicated “Exemplary Target” genes is correlated with a particular “Disease Class” and/or “Preferred Indication” as shown in the corresponding row under the respective column headings.

[0042] The “Exemplary Accessions” Column indicates GenBank Accessions (available online through the National Center for Biotechnology Information (NCBI)) which correspond to the “Exemplary Targets” shown in the adjacent row.

[0043] The recitation of “Cancer” in the “Disease Class” Column indicates that the corresponding nucleic acid and protein, or antibody against the same, of the invention (or fragment or variant thereof) may be used for example, to detect, diagnose, prevent, treat, and/or ameliorate neoplastic diseases and/or disorders (e.g., leukemias, cancers, etc., as described below under “Hyperproliferative Disorders”).

[0044] The recitation of “Immune” in the “Disease Class” column indicates that the corresponding nucleic acid and protein, or antibody against the same, of the invention (or fragment or variant thereof), may be used for example, to detect, diagnose, prevent, treat, and/or ameliorate diseases and/or disorders relating to neoplastic diseases (e.g., as described below under “Hyperproliferative Disorders”), blood disorders (e.g., as described below under “Immune Activity” “Cardiovascular Disorders” and/or “Blood-Related Disorders”), and infections (e.g., as described below under “Infectious Disease”).

[0045] The recitation of “Angiogenesis” in the “Disease Class” column indicates that the corresponding nucleic acid and protein, or antibody against the same, of the invention (or fragment or variant thereof), may be used for example, to detect, diagnose, treat, prevent, and/or ameliorate diseases and/or disorders relating to neoplastic diseases (e.g., as described below under “Hyperproliferative Disorders”), diseases and/or disorders of the cardiovascular system (e.g., as described below under “Cardiovascular Disorders”), diseases and/or disorders involving cellular and genetic abnormalities (e.g., as described below under “Diseases at the Cellular Level”), diseases and/or disorders involving angiogenesis (e.g., as described below under “Anti-Angiogenesis Activity”), to promote or inhibit cell or tissue regeneration (e.g., as described below under “Regeneration”), or to promote wound healing (e.g., as described below under “Wound Healing and Epithelial Cell Proliferation”).

[0046] The recitation of “Diabetes” in the “Disease Class” column indicates that the corresponding nucleic acid and protein, or antibody against the same, of the invention (or fragment or variant thereof), may be used for example, to detect, diagnose, treat, prevent, and/or ameliorate diabetes (including diabetes mellitus types I and II), as well as diseases and/or disorders associated with, or consequential to, diabetes (e.g. as described below under “Endocrine Disorders,” “Renal Disorders,” and “Gastrointestinal Disorders”).

Description of Table 2

[0047] Table 2 summarizes homology and features of some of the polypeptides of the invention. The first column provides a unique clone identifier, “Clone ID:”, corresponding to a cDNA clone disclosed in Table 1A or Table 1B. The second column provides the unique contig identifier, “Contig ID:” corresponding to contigs in Table 1B and allowing for correlation with the information in Table 1B. The third column provides the sequence identifier, “SEQ ID NO:X”, for the contig polynucleotide sequence. The fourth column provides the analysis method by which the homology/identity disclosed in the Table was determined. Comparisons were made between polypeptides encoded by the polynucleotides of the invention and either a non-redundant protein database (herein referred to as “NR”), or a database of protein families (herein referred to as “PFAM”) as further described below. The fifth column provides a description of the PFAM/NR hit having a significant match to a polypeptide of the invention. Column six provides the accession number of the PFAM/NR hit disclosed in the fifth column. Column seven, “Score/Percent Identity”, provides a quality score or the percent identity, of the hit disclosed in columns five and six. Columns 8 and 9, “NT From” and “NT To” respectively, delineate the polynucleotides in “SEQ ID NO:X” that encode a polypeptide having a significant match to the PFAM/NR database as disclosed in the fifth and sixth columns. In specific embodiments polypeptides of the invention comprise, or alternatively consist of, an amino acid sequence encoded by a polynucleotide in SEQ ID NO:X as delineated in columns 8 and 9, or fragments or variants thereof.

Description of Table 3

[0048] Table 3 provides polynucleotide sequences that may be disclaimed according to certain embodiments of the invention. The first column provides a unique clone identifier, “Clone ID”, for a cDNA clone related to contig sequences disclosed in Table 1B. The second column provides the sequence identifier, “SEQ ID NO:X”, for contig sequences disclosed in Table 1A and/or Table 1B. The third column provides the unique contig identifier, “Contig ID:”, for contigs disclosed in Table 1B. The fourth column provides a unique integer ‘a’ where ‘a’ is any integer between 1 and the final nucleotide minus 15 of SEQ ID NO:X and the fifth column provides a unique integer ‘b’ where ‘b’ is any integer between 15 and the final nucleotide of SEQ ID NO:X, where both a and b correspond to the positions of nucleotide residues shown in SEQ ID NO:X, and where b is greater than or equal to a +14. For each of the polynucleotides shown as SEQ ID NO:X, the uniquely defined integers can be substituted into the general formula of a−b, and used to describe polynucleotides which may be preferably excluded from the invention. In certain embodiments, preferably excluded from the invention are at least one, two, three, four, five, ten, or more of the polynucleotide sequence(s) having the accession number(s) disclosed in the sixth column of this Table (including for example, published sequence in connection with a particular BAC clone). In further embodiments, preferably excluded from the invention are the specific polynucleotide sequence(s) contained in the clones corresponding to at least one, two, three, four, five, ten, or more of the available material having the accession numbers identified in the sixth column of this Table (including for example, the actual sequence contained in an identified BAC clone).

Description of Table 4

[0049] Table 4 provides a key to the tissue/cell source identifier code disclosed in Table 1B.2, column 5. Column 1 of Table 4 provides the tissue/cell source identifier code disclosed in Table 1B.2, column 5. Columns 2-5 provide a description of the tissue or cell source. Note that “Description” and “Tissue” sources (i.e. columns 2 and 3) having the prefix “a_” indicates organs, tissues, or cells derived from “adult” sources. Codes corresponding to diseased tissues are indicated in column 6 with the word “disease.” The use of the word “disease” in column 6 is non-limiting. The tissue or cell source may be specific (e.g. a neoplasm), or may be disease-associated (e.g., a tissue sample from a normal portion of a diseased organ). Furthermore, tissues and/or cells lacking the “disease” designation may still be derived from sources directly or indirectly involved in a disease state or disorder, and therefore may have a further utility in that disease state or disorder. In numerous cases where the tissue/cell source is a library, column 7 identifies the vector used to generate the library.

Description of Table 5

[0050] Table 5 provides a key to the OMIM reference identification numbers disclosed in Table 1B.1, column 9. OMIM reference identification numbers (Column 1) were derived from Online Mendelian Inheritance in Man (Online Mendelian Inheritance in Man, OMIM. McKusick-Nathans Institute for Genetic Medicine, Johns Hopkins University (Baltimore, Md.) and National Center for Biotechnology Information, National Library of Medicine, (Bethesda, Md.) 2000. World Wide Web URL: http://www.ncbi.nlm.nih.gov/omim/). Column 2 provides diseases associated with the cytologic band disclosed in Table 1B.1, column 8, as determined using the Morbid Map database.

Description of Table 6

[0051] Table 6 summarizes some of the ATCC™ Deposits, Deposit dates, and ATCC™ designation numbers of deposits made with the ATCC™ in connection with the present application. These deposits were made in addition to those described in the Table 1A

Description of Table 7

[0052] Table 7 shows the cDNA libraries sequenced, and ATCC™ designation numbers and vector information relating to these cDNA libraries.

[0053] The first column shows the first four letters indicating the Library from which each library clone was derived. The second column indicates the catalogued tissue description for the corresponding libraries. The third column indicates the vector containing the corresponding clones. The fourth column shows the ATCC™ deposit designation for each libray clone as indicated by the deposit information in Table 6.

Definitions

[0054] The following definitions are provided to facilitate understanding of certain terms used throughout this specification.

[0055] In the present invention, “isolated” refers to material removed from its original environment (e.g., the natural environment if it is naturally occurring), and thus is altered “by the hand of man” from its natural state. For example, an isolated polynucleotide could be part of a vector or a composition of matter, or could be contained within a cell, and still be “isolated” because that vector, composition of matter, or particular cell is not the original environment of the polynucleotide. The term “isolated” does not refer to genomic or cDNA libraries, whole cell total or mRNA preparations, genomic DNA preparations (including those separated by electrophoresis and transferred onto blots), sheared whole cell genomic DNA preparations or other compositions where the art demonstrates no distinguishing features of the polynucleotide/sequences of the present invention.

[0056] In the present invention, a “secreted” protein refers to those proteins capable of being directed to the ER, secretory vesicles, or the extracellular space as a result of a signal sequence, as well as those proteins released into the extracellular space without necessarily containing a signal sequence. If the secreted protein is released into the extracellular space, the secreted protein can undergo extracellular processing to produce a “mature” protein. Release into the extracellular space can occur by many mechanisms, including exocytosis and proteolytic cleavage.

[0057] As used herein, a “polynucleotide” refers to a molecule having a nucleic acid sequence encoding SEQ ID NO:Y or a fragment or variant thereof (e.g., the polypeptide delinated in columns fourteen and fifteen of Table 1A); a nucleic acid sequence contained in SEQ ID NO:X (as described in column 5 of Table 1A and/or column 3 of Table 1B) or the complement thereof; a cDNA sequence contained in Clone ID: (as described in column 2 of Table 1A and/or Table 1B and contained within a library deposited with the ATCC™); a nucleotide sequence encoding the polypeptide encoded by a nucleotide sequence in SEQ ID NO:B as defined in column 6 (EXON From-To) of Table 1C or a fragment or variant thereof; or a nucleotide coding sequence in SEQ ID NO:B as defined in column 6 of Table 1C or the complement thereof. For example, the polynucleotide can contain the nucleotide sequence of the full-length cDNA sequence, including the 5′ and 3′ untranslated sequences, the coding region, as well as fragments, epitopes, domains, and variants of the nucleic acid sequence. Moreover, as used herein, a “polypeptide” refers to a molecule having an amino acid sequence encoded by a polynucleotide of the invention as broadly defined (obviously excluding poly-Phenylalanine or poly-Lysine peptide sequences which result from translation of a polyA tail of a sequence corresponding to a cDNA).

[0058] In the present invention, “SEQ ID NO:X” was often generated by overlapping sequences contained in multiple clones (contig analysis). A representative clone containing all or most of the sequence for SEQ ID NO:X is deposited at Human Genome Sciences, Inc. (HGS) in a catalogued and archived library. As shown, for example, in column 2 of Table 1B, each clone is identified by a cDNA Clone ID (identifier generally referred to herein as Clone ID:). Each Clone ID is unique to an individual clone and the Clone ID is all the information needed to retrieve a given clone from the HGS library. Table 7 provides a list of the deposited cDNA libraries. One can use the Clone ID: to determine the library source by reference to Tables 6 and 7. Table 7 lists the deposited cDNA libraries by name and links each library to an ATCC™ Deposit. Library names contain four characters, for example, “HTWE.” The name of a cDNA clone (Clone ID) isolated from that library begins with the same four characters, for example “HTWEP07”. As mentioned below, Table 1A and/or Table 1B correlates the Clone ID names with SEQ ID NO:X. Thus, starting with an SEQ ID NO:X, one can use Tables 1A, 1B, 6, 7, and 9 to determine the corresponding Clone ID, which library it came from and which ATCC™ deposit the library is contained in. Furthermore, it is possible to retrieve a given cDNA clone from the source library by techniques known in the art and described elsewhere herein. The ATCC™ is located at 10801 University Boulevard, Manassas, Va. 20110-2209, USA. The ATCC™ deposits were made pursuant to the terms of the Budapest Treaty on the international recognition of the deposit of microorganisms for the purposes of patent procedure.

[0059] In specific embodiments, the polynucleotides of the invention are at least 15, at least 30, at least 50, at least 100, at least 125, at least 500, or at least 1000 continuous nucleotides but are less than or equal to 300 kb, 200 kb, 100 kb, 50 kb, 15 kb, 10 kb, 7.5 kb, 5 kb, 2.5 kb, 2.0 kb, or 1 kb, in length. In a further embodiment, polynucleotides of the invention comprise a portion of the coding sequences, as disclosed herein, but do not comprise all or a portion of any intron. In another embodiment, the polynucleotides comprising coding sequences do not contain coding sequences of a genomic flanking gene (i.e., 5′ or 3′ to the gene of interest in the genome). In other embodiments, the polynucleotides of the invention do not contain the coding sequence of more than 1000, 500, 250, 100, 50, 25, 20, 15, 10, 5, 4, 3, 2, or 1 genomic flanking gene(s).

[0060] A “polynucleotide” of the present invention also includes those polynucleotides capable of hybridizing, under stringent hybridization conditions, to sequences contained in SEQ ID NO:X, or the complement thereof (e.g., the complement of any one, two, three, four, or more of the polynucleotide fragments described herein), the polynucleotide sequence delineated in columns 7 and 8 of Table 1A or the complement thereof, the polynucleotide sequence delineated in columns 8 and 9 of Table 2 or the complement thereof, and/or cDNA sequences contained in Clone ID: (e.g., the complement of any one, two, three, four, or more of the polynucleotide fragments, or the cDNA clone within the pool of cDNA clones deposited with the ATCC™, described herein), and/or the polynucleotide sequence delineated in column 6 of Table 1C or the complement thereof. “Stringent hybridization conditions” refers to an overnight incubation at 42 degree C. in a solution comprising 50% formamide, 5×SSC (750 mM NaCl, 75 mM trisodium citrate), 50 mM sodium phosphate (pH 7.6), 5× Denhardt's solution, 10% dextran sulfate, and 20 μg/ml denatured, sheared salmon sperm DNA, followed by washing the filters in 0.1×SSC at about 65 degree C.

[0061] Also contemplated are nucleic acid molecules that hybridize to the polynucleotides of the present invention at lower stringency hybridization conditions. Changes in the stringency of hybridization and signal detection are primarily accomplished through the manipulation of formamide concentration (lower percentages of formamide result in lowered stringency); salt conditions, or temperature. For example, lower stringency conditions include an overnight incubation at 37 degree C. in a solution comprising 6×SSPE (20×SSPE=3M NaCl; 0.2M NaH₂PO₄; 0.02M EDTA, pH 7.4), 0.5% SDS, 30% formamide, 100 ug/ml salmon sperm blocking DNA; followed by washes at 50 degree C. with 1×SSPE, 0.1% SDS. In addition, to achieve even lower stringency, washes performed following stringent hybridization can be done at higher salt concentrations (e.g. 5×SSC).

[0062] Note that variations in the above conditions may be accomplished through the inclusion and/or substitution of alternate blocking reagents used to suppress background in hybridization experiments. Typical blocking reagents include Denhardt's reagent, BLOTTO, heparin, denatured salmon sperm DNA, and commercially available proprietary formulations. The inclusion of specific blocking reagents may require modification of the hybridization conditions described above, due to problems with compatibility.

[0063] Of course, a polynucleotide which hybridizes only to polyA+ sequences (such as any 3′ terminal polyA+ tract of a cDNA shown in the sequence listing), or to a complementary stretch of T (or U) residues, would not be included in the definition of “polynucleotide,” since such a polynucleotide would hybridize to any nucleic acid molecule containing a poly (A) stretch or the complement thereof (e.g., practically any double-stranded cDNA clone generated using oligo dT as a primer).

[0064] The polynucleotide of the present invention can be composed of any polyribonucleotide or polydeoxribonucleotide, which may be unmodified RNA or DNA or modified RNA or DNA. For example, polynucleotides can be composed of single- and double-stranded DNA, DNA that is a mixture of single- and double-stranded regions, single- and double-stranded RNA, and RNA that is mixture of single- and double-stranded regions, hybrid molecules comprising DNA and RNA that may be single-stranded or, more typically, double-stranded or a mixture of single- and double-stranded regions. In addition, the polynucleotide can be composed of triple-stranded regions comprising RNA or DNA or both RNA and DNA. A polynucleotide may also contain one or more modified bases or DNA or RNA backbones modified for stability or for other reasons. “Modified” bases include, for example, tritylated bases and unusual bases such as inosine. A variety of modifications can be made to DNA and RNA; thus, “polynucleotide” embraces chemically, enzymatically, or metabolically modified forms.

[0065] In specific embodiments, the polynucleotides of the invention are at least 15, at least 30, at least 50, at least 100, at least 125, at least 500, or at least 1000 continuous nucleotides but are less than or equal to 300 kb, 200 kb, 100 kb, 50 kb, 15 kb, 10 kb, 7.5 kb, 5 kb, 2.5 kb, 2.0 kb, or 1 kb, in length. In a further embodiment, polynucleotides of the invention comprise a portion of the coding sequences, as disclosed herein, but do not comprise all or a portion of any intron. In another embodiment, the polynucleotides comprising coding sequences do not contain coding sequences of a genomic flanking gene (i.e., 5′ or 3′ to the gene of interest in the genome). In other embodiments, the polynucleotides of the invention do not contain the coding sequence of more than 1000, 500, 250, 100, 50, 25, 20, 15, 10, 5, 4, 3, 2, or 1 genomic flanking gene(s).

[0066] “SEQ ID NO:X” refers to a polynucleotide sequence described in column 5 of Table 1A, while “SEQ ID NO:Y” refers to a polypeptide sequence described in column 10 of Table 1A. SEQ ID NO:X is identified by an integer specified in column 6 of Table 1A. The polypeptide sequence SEQ ID NO:Y is a translated open reading frame (ORF) encoded by polynucleotide SEQ ID NO:X. The polynucleotide sequences are shown in the sequence listing immediately followed by all of the polypeptide sequences. Thus, a polypeptide sequence corresponding to polynucleotide sequence SEQ ID NO:2 is the first polypeptide sequence shown in the sequence listing. The second polypeptide sequence corresponds to the polynucleotide sequence shown as SEQ ID NO:3, and so on.

[0067] The polypeptide of the present invention can be composed of amino acids joined to each other by peptide bonds or modified peptide bonds, i.e., peptide isosteres, and may contain amino acids other than the 20 gene-encoded amino acids. The polypeptides may be modified by either natural processes, such as posttranslational processing, or by chemical modification techniques which are well known in the art. Such modifications are well described in basic texts and in more detailed monographs, as well as in a voluminous research literature. Modifications can occur anywhere in a polypeptide, including the peptide backbone, the amino acid side-chains and the amino or carboxyl termini. It will be appreciated that the same type of modification may be present in the same or varying degrees at several sites in a given polypeptide. Also, a given polypeptide may contain many types of modifications. Polypeptides may be branched, for example, as a result of ubiquitination, and they may be cyclic, with or without branching. Cyclic, branched, and branched cyclic polypeptides may result from posttranslation natural processes or may be made by synthetic methods. Modifications include acetylation, acylation, ADP-ribosylation, amidation, covalent attachment of flavin, covalent attachment of a heme moiety, covalent attachment of a nucleotide or nucleotide derivative, covalent attachment of a lipid or lipid derivative, covalent attachment of phosphotidylinositol, cross-linking, cyclization, disulfide bond formation, demethylation, formation of covalent cross-links, formation of cysteine, formation of pyroglutamate, formylation, gamma-carboxylation, glycosylation, GPI anchor formation, hydroxylation, iodination, methylation, myristoylation, oxidation, pegylation, proteolytic processing, phosphorylation, prenylation, racemization, selenoylation, sulfation, transfer-RNA mediated addition of amino acids to proteins such as arginylation, and ubiquitination. (See, for instance, PROTEINS—STRUCTURE AND MOLECULAR PROPERTIES, 2nd Ed., T. E. Creighton, W. H. Freeman and Company, New York (1993); POSTTRANSLATIONAL COVALENT MODIFICATION OF PROTEINS, B. C. Johnson, Ed., Academic Press, New York, pgs. 1-12 (1983); Seifler et al., Meth. Enzymol. 182:626-646 (1990); Rattan et al., Ann. N.Y. Acad. Sci. 663:48-62 (1992)).

[0068] “SEQ ID NO:X” refers to a polynucleotide sequence described, for example, in Tables 1A, Table 1B, or Table 2, while “SEQ ID NO:Y” refers to a polypeptide sequence described in column 11 of Table 1A and or Table 1B. SEQ ID NO:X is identified by an integer specified in column 4 of Table 1B. The polypeptide sequence SEQ ID NO:Y is a translated open reading frame (ORF) encoded by polynucleotide SEQ ID NO:X. “Clone ID:” refers to a cDNA clone described in column 2 of Table 1A and/or 1B.

[0069] “A polypeptide having functional activity” refers to a polypeptide capable of displaying one or more known functional activities associated with a full-length (complete) protein. Such functional activities include, but are not limited to, biological activity (e.g. activity useful in treating, preventing and/or ameliorating allergic and/or asthmatic diseases and disorders), antigenicity (ability to bind [or compete with a polypeptide for binding] to an anti-polypeptide antibody), immunogenicity (ability to generate antibody which binds to a specific polypeptide of the invention), ability to form multimers with polypeptides of the invention, and ability to bind to a receptor or ligand for a polypeptide.

[0070] The polypeptides of the invention can be assayed for functional activity (e.g. biological activity) using or routinely modifying assays known in the art, as well as assays described herein. Specifically, one of skill in the art may routinely assay secreted polypeptides (including fragments and variants) of the invention for activity using assays as described in the examples section below.

[0071] “A polypeptide having biological activity” refers to a polypeptide exhibiting activity similar to, but not necessarily identical to, an activity of a polypeptide of the present invention, including mature forms, as measured in a particular biological assay, with or without dose dependency. In the case where dose dependency does exist, it need not be identical to that of the polypeptide, but rather substantially similar to the dose-dependence in a given activity as compared to the polypeptide of the present invention (i.e., the candidate polypeptide will exhibit greater activity or not more than about 25-fold less and, preferably, not more than about tenfold less activity, and most preferably, not more than about three-fold less activity relative to the polypeptide of the present invention).

Tables

[0072] Table 1A

[0073] Table 1A summarizes information concerning certain polypnucleotides and polypeptides of the invention. The first column provides the gene number in the application for each clone identifier. The second column provides a unique clone identifier, “Clone ID:”, for a cDNA clone related to each contig sequence disclosed in Table 1A Third column, the cDNA Clones identified in the second column were deposited as indicated in the third column (i.e. by ATCC™ Deposit No:Z and deposit date). Some of the deposits contain multiple different clones corresponding to the same gene. In the fourth column, “Vector” refers to the type of vector contained in the corresponding cDNA Clone identified in the second column. In the fifth column, the nucleotide sequence identified as “NT SEQ ID NO:X” was assembled from partially homologous (“overlapping”) sequences obtained from the corresponding cDNA clone identified in the second column and, in some cases, from additional related cDNA clones. The overlapping sequences were assembled into a single contiguous sequence of high redundancy (usually three to five overlapping sequences at each nucleotide position), resulting in a final sequence identified as SEQ ID NO:X. In the sixth column, “Total NT Seq.” refers to the total number of nucleotides in the contig sequence identified as SEQ ID NO:X.” The deposited clone may contain all or most of these sequences, reflected by the nucleotide position indicated as “5′ NT of Clone Seq.” (seventh column) and the “3′ NT of Clone Seq.” (eighth column) of SEQ ID NO:X. In the ninth column, the nucleotide position of SEQ ID NO:X of the putative start codon (methionine) is identified as “5′ NT of Start Codon.” Similarly, in column ten, the nucleotide position of SEQ ID NO:X of the predicted signal sequence is identified as “5′ NT of First AA of Signal Pep.” In the eleventh column, the translated amino acid sequence, beginning with the methionine, is identified as “AA SEQ ID NO:Y,” although other reading frames can also be routinely translated using known molecular biology techniques. The polypeptides produced by these alternative open reading frames are specifically contemplated by the present invention.

[0074] In the twelfth and thirteenth columns of Table 1A, the first and last amino acid position of SEQ ID NO:Y of the predicted signal peptide is identified as “First AA of Sig Pep” and “Last AA of Sig Pep.” In the fourteenth column, the predicted first amino acid position of SEQ ID NO:Y of the secreted portion is identified as “Predicted First AA of Secreted Portion”. The amino acid position of SEQ ID NO:Y of the last amino acid encoded by the open reading frame is identified in the fifteenth column as “Last AA of ORF”.

[0075] SEQ ID NO:X (where X may be any of the polynucleotide sequences disclosed in the sequence listing) and the translated SEQ ID NO:Y (where Y may be any of the polypeptide sequences disclosed in the sequence listing) are sufficiently accurate and otherwise suitable for a variety of uses well known in the art and described further below. For instance, SEQ ID NO:X is useful for designing nucleic acid hybridization probes that will detect nucleic acid sequences contained in SEQ ID NO:X or the cDNA contained in the deposited clone. These probes will also hybridize to nucleic acid molecules in biological samples, thereby enabling a variety of forensic and diagnostic methods of the invention. Similarly, polypeptides identified from SEQ ID NO:Y may be used, for example, to generate antibodies which bind specifically to proteins containing the polypeptides and the secreted proteins encoded by the cDNA clones identified in Table 1A and/or elsewhere herein

[0076] Nevertheless, DNA sequences generated by sequencing reactions can contain sequencing errors. The errors exist as misidentified nucleotides, or as insertions or deletions of nucleotides in the generated DNA sequence. The erroneously inserted or deleted nucleotides cause frame shifts in the reading frames of the predicted amino acid sequence. In these cases, the predicted amino acid sequence diverges from the actual amino acid sequence, even though the generated DNA sequence may be greater than 99.9% identical to the actual DNA sequence (for example, one base insertion or deletion in an open reading frame of over 1000 bases).

[0077] Accordingly, for those applications requiring precision in the nucleotide sequence or the amino acid sequence, the present invention provides not only the generated nucleotide sequence identified as SEQ ID NO:X, and the predicted translated amino acid sequence identified as SEQ ID NO:Y, but also a sample of plasmid DNA containing a human cDNA of the invention deposited with the ATCC™, as set forth in Table 1A. The nucleotide sequence of each deposited plasmid can readily be determined by sequencing the deposited plasmid in accordance with known methods

[0078] The predicted amino acid sequence can then be verified from such deposits. Moreover, the amino acid sequence of the protein encoded by a particular plasmid can also be directly determined by peptide sequencing or by expressing the protein in a suitable host cell containing the deposited human cDNA, collecting the protein, and determining its sequence.

[0079] Also provided in Table 1A is the name of the vector which contains the cDNA plasmid. Each vector is routinely used in the art. The following additional information is provided for convenience.

[0080] Vectors Lambda Zap (U.S. Pat. Nos. 5,128,256 and 5,286,636), Uni-Zap XR (U.S. Pat. Nos. 5,128,256 and 5,286,636), Zap Express (U.S. Pat. Nos. 5,128,256 and 5,286,636), pBLUESCRIPT™ (pBS) (Short, J. M. et al., Nucleic Acids Res. 16:7583-7600 (1988); Alting-Mees, M. A. and Short, J. M., Nucleic Acids Res. 17:9494 (1989)) and pBK (Alting-Mees, M. A. et al., Strategies 5:58-61 (1992)) are commercially available from Stratagene Cloning Systems, Inc., 11011 N. Torrey Pines Road, La Jolla, Calif., 92037. pBS contains an ampicillin resistance gene and pBK contains a neomycin resistance gene. Phagemid pBS may be excised from the Lambda Zap and Uni-Zap XR vectors, and phagemid pBK may be excised from the Zap Express vector. Both phagemids may be transformed into E. coli strain XL-1 Blue, also available from STRATAGENE™

[0081] Vectors pSport1, pCMVSport 1.0, pCMVSport 2.0 and pCMVSport 3.0, were obtained from Life Technologies, Inc., P.O. Box 6009, Gaithersburg, Md. 20897. All Sport vectors contain an ampicillin resistance gene and may be transformed into E. coli strain DH10B, also available from LIFE TECHNOLOGIES™. See, for instance, Gruber, C. E., et al., Focus 15:59 (1993). Vector lafmid BA (Bento Soares, Columbia University, New York, N.Y.) contains an ampicillin resistance gene and can be transformed into E. coli strain XL-1 Blue. Vector pCR®2.1, which is available from Invitrogen, 1600 Faraday Avenue, Carlsbad, Calif. 92008, contains an ampicillin resistance gene and may be transformed into E. coli strain DH10B, available from LIFE TECHNOLOGIES™. See, for instance, Clark, J. M., Nuc. Acids Res. 16:9677-9686 (1988) and Mead, D. et al., Bio/Technology 9: (1991).

[0082] The present invention also relates to the genes corresponding to SEQ ID NO:X, SEQ ID NO:Y, and/or a deposited cDNA (cDNA Clone ID). The corresponding gene can be isolated in accordance with known methods using the sequence information disclosed herein. Such methods include, but are not limited to, preparing probes or primers from the disclosed sequence and identifying or amplifying the corresponding gene from appropriate sources of genomic material.

[0083] Also provided in the present invention are allelic variants, orthologs, and/or species homologs. Procedures known in the art can be used to obtain full-length genes, allelic variants, splice variants, full-length coding portions, orthologs, and/or species homologs of genes corresponding to SEQ ID NO:X and SEQ ID NO:Y using information from the sequences disclosed herein or the clones deposited with the ATCC™. For example, allelic variants and/or species homologs may be isolated and identified by making suitable probes or primers from the sequences provided herein and screening a suitable nucleic acid source for allelic variants and/or the desired homologue.

[0084] The present invention provides a polynucleotide comprising, or alternatively consisting of, the nucleic acid sequence of SEQ ID NO:X and/or a cDNA contained in ATCC™ Deposit No. Z. The present invention also provides a polypeptide comprising, or alternatively, consisting of, the polypeptide sequence of SEQ ID NO:Y, a polypeptide encoded by SEQ ID NO:X, and/or a polypeptide encoded by a cDNA contained in ATCC™ deposit No. Z. Polynucleotides encoding a polypeptide comprising, or alternatively consisting of the polypeptide sequence of SEQ ID NO:Y, a polypeptide encoded by SEQ ID NO:X and/or a polypeptide encoded by the cDNA contained in ATCC™ Deposit No. Z, are also encompassed by the invention. The present invention further encompasses a polynucleotide comprising, or alternatively consisting of the complement of the nucleic acid sequence of SEQ ID NO:X, and/or the complement of the coding strand of the cDNA contained in ATCC™ Deposit No. Z.

TABLE 1A

| | | | | | | | | | 5′ NT of | | | | | |
|---|---|---|---|---|---|---|---|---|---|---|---|---|---|---|
| | | | | | | 5′ NT of | 3′ NT of | 5′ NT of | First AA | AA SEQ | First AA of | Last AA of | First AA of | Last |
| Gene | cDNA | ATCC ™ Deposit | | NT SEQ ID | Total | Clone | Clone | Start | of Signal | ID | Sig | Sig | Secreted | AA of |
| No. | Clone ID | No: Z and Date | Vector | NO: X | NT Seq. | Seq. | Seq. | Codon | Pep | NO: Y | Pep | Pep | Portion | ORF |
| 1 | H2MAC30 | 209299 Sep. 25, 1997 | pBLUESCRIPT ™ | 11 | 459 | 1 | 459 | 157 | 157 | 305 | 1 | 28 | 29 | 72 |
| | | | SK− | | | | | | | | | | | |
| 2 | H6EDF66 | 209299 Sep. 25, 1997 | Uni-ZAP XR | 12 | 540 | 1 | 540 | 146 | 146 | 306 | 1 | 27 | 28 | 131 |
| 3 | H6EDX46 | 209626 Feb. 12, 1998 | Uni-ZAP XR | 13 | 888 | 1 | 888 | 229 | 229 | 307 | 1 | 20 | 21 | 182 |
| 3 | H6EDX46 | 209626 Feb. 12, 1998 | Uni-ZAP XR | 206 | 718 | 1 | 718 | 128 | 128 | 500 | 1 | 20 | 21 | 84 |
| 4 | HABAG37 | 209626 Feb. 12, 1998 | pSport1 | 14 | 654 | 1 | 639 | 97 | 97 | 308 | 1 | 31 | 32 | 62 |
| 5 | HACBD91 | 209626 Feb. 12, 1998 | Uni-ZAP XR | 15 | 1445 | 1 | 1445 | 117 | 117 | 309 | 1 | 42 | 43 | 49 |
| 6 | HACC117 | 203071 Jul. 27, 1998 | Uni-ZAP XR | 16 | 1722 | 336 | 1714 | 461 | 461 | 310 | 1 | 24 | 25 | 218 |
| 6 | HACC117 | 203071 Jul. 27, 1998 | Uni-ZAP XR | 207 | 1380 | 12 | 1380 | 135 | 135 | 501 | 1 | 24 | 25 | 72 |
| 7 | HAGAM64 | 209603 Jan. 29, 1998 | Uni-ZAP XR | 17 | 2321 | 1 | 2321 | 57 | 57 | 311 | 1 | 31 | 32 | 44 |
| 8 | HAHDR32 | 209626 Feb. 12, 1998 | Uni-ZAP XR | 18 | 1256 | 365 | 1256 | 435 | 435 | 312 | 1 | 25 | 26 | 181 |
| 9 | HAIBO71 | 209145 Jul. 17, 1997 | Uni-ZAP XR | 19 | 752 | 172 | 752 | 325 | 325 | 313 | 1 | 28 | 29 | 66 |
| 10 | HAJAF57 | 203364 Oct. 19, 1998 | pCMVSport 3.0 | 20 | 2761 | 1 | 2761 | 43 | 43 | 314 | 1 | 1 | 2 | 94 |
| 11 | HAMFC93 | PTA-849 Oct. 13, 1999 | pCMVSport 3.0 | 21 | 2534 | 1 | 2534 | 136 | 136 | 315 | 1 | 30 | 31 | 191 |
| 11 | HAMFC93 | PTA-849 Oct. 13, 1999 | pCMVSport 3.0 | 208 | 824 | 1 | 824 | 115 | 115 | 502 | 1 | 30 | 31 | 178 |
| 11 | HAMFC93 | PTA-849 Oct. 13, 1999 | pCMVSport 3.0 | 209 | 3941 | 1947 | 3941 | | 323 | 503 | 1 | | | 8 |
| 12 | HAPNY86 | 209511 Dec. 03, 1997 | Uni-ZAP XR | 22 | 1280 | 1 | 1280 | 100 | 100 | 316 | 1 | 25 | 26 | 129 |
| 13 | HATDF29 | 203858 Mar. 18, 1999 | Uni-ZAP XR | 23 | 1355 | 1 | 1355 | 143 | 143 | 317 | 1 | 30 | 31 | 385 |
| 14 | HBAFJ33 | 209603 Jan. 29, 1998 | pSport1 | 24 | 1280 | 1 | 1252 | 60 | 60 | 318 | 1 | 15 | 16 | 110 |
| 15 | HBAFV19 | PTA-1543 Mar. 21, 2000 | pSport1 | 25 | 953 | 1 | 953 | 6 | 6 | 319 | 1 | 1 | 2 | 258 |
| 16 | HBIBW67 | 209324 Oct. 02, 1997 | Uni-ZAP XR | 26 | 1404 | 1 | 1404 | 685 | 685 | 320 | 1 | 33 | 34 | 38 |
| 17 | HBIMB51 | 209683 Mar. 20, 1998 | pCMVSport 3.0 | 27 | 537 | 1 | 537 | 98 | 98 | 321 | 1 | 21 | 22 | 146 |
| 17 | HBIMB51 | 209683 Mar. 20, 1998 | pCMVSport 3.0 | 210 | 526 | 1 | 526 | 93 | 93 | 504 | 1 | 21 | 22 | 130 |
| 18 | HBJID05 | 209300 Sep. 25, 1997 | Uni-ZAP XR | 28 | 2008 | 1 | 2008 | 157 | 157 | 322 | 1 | 20 | 21 | 199 |
| 18 | HBJID05 | 209300 Sep. 25, 1997 | Uni-ZAP XR | 211 | 571 | 1 | 571 | 137 | 137 | 505 | 1 | 20 | 21 | 111 |
| 19 | HBJJU28 | 209346 Oct. 09, 1997 | Uni-ZAP XR | 29 | 1160 | 1 | 1160 | 133 | 133 | 323 | 1 | 18 | 19 | 84 |
| 20 | HBJLH40 | 203499 Dec. 01, 1998 | Uni-ZAP XR | 30 | 1853 | 1 | 1853 | 74 | 74 | 324 | 1 | 30 | 31 | 74 |
| 21 | HBXFL29 | 203858 Mar. 18, 1999 | ZAP Express | 31 | 2229 | 376 | 2210 | 560 | 560 | 325 | 1 | 31 | 32 | 57 |
| 22 | HCACU58 | 209626 Feb. 12, 1998 | Uni-ZAP XR | 32 | 1554 | 1 | 1554 | 137 | 137 | 326 | 1 | 30 | 31 | 83 |
| 23 | HCDBW86 | 209242 Sep. 12, 1997 | Uni-ZAP XR | 33 | 730 | 1 | 730 | 139 | 139 | 327 | 1 | 18 | 19 | 30 |
| 24 | HCE3G69 | 209878 May 18, 1998 | Uni-ZAP XR | 34 | 2084 | 1 | 2084 | 165 | 165 | 328 | 1 | 19 | 20 | 336 |
| 24 | HCE3G69 | 209878 May 18, 1998 | Uni-ZAP XR | 212 | 2078 | 1 | 2078 | 165 | 165 | 506 | 1 | 19 | 20 | 105 |
| 25 | HCEEA88 | 209626 Feb. 12, 1998 | Uni-ZAP XR | 35 | 1016 | 1 | 1016 | 134 | 134 | 329 | 1 | 23 | 24 | 60 |
| 26 | HCEFB69 | 209965 Jun. 11, 1998 | Uni-ZAP XR | 36 | 1430 | 1 | 1430 | 188 | 188 | 330 | 1 | 24 | 25 | 224 |
| 27 | HCFMV71 | 209242 Sep. 12, 1997 | pSport1 | 37 | 400 | 1 | 400 | 31 | 31 | 331 | 1 | 24 | 25 | 58 |
| 28 | HCNSD93 | 209627 Feb. 12, 1998 | pBLUESCRIPT ™ | 38 | 1106 | 1 | 1106 | 139 | 139 | 332 | 1 | 21 | 22 | 46 |
| 29 | HCUIM65 | 209324 Oct. 02, 1997 | ZAP Express | 39 | 875 | 331 | 736 | 557 | 557 | 333 | 1 | 27 | 28 | 47 |
| 30 | HCWKC15 | 209324 Oct. 02, 1997 | ZAP Express | 40 | 710 | 1 | 710 | 37 | 37 | 334 | 1 | 18 | 19 | 40 |
| 31 | HCWLD74 | 209626 Feb. 12, 1998 | ZAP Express | 41 | 1540 | 1 | 1540 | 138 | 138 | 335 | 1 | 21 | 22 | 65 |
| 32 | HDHEB60 | 209215 Aug. 21, 1997 | pCMVSport 2.0 | 42 | 1421 | 235 | 1421 | 568 | 568 | 336 | 1 | 24 | 25 | 108 |
| 33 | HDHMA45 | 203331 Oct. 08, 1998 | pCMVSport 2.0 | 43 | 2184 | 1 | 2184 | 199 | 199 | 337 | 1 | 33 | 34 | 413 |
| 33 | HDHMA45 | 203331 Oct. 08, 1998 | pCMVSport 2.0 | 213 | 2190 | 1 | 2190 | 204 | 204 | 507 | 1 | 33 | 34 | 413 |
| 34 | HDHMA72 | 209324 Oct. 02, 1997 | pCMVSport 2.0 | 44 | 4463 | 216 | 2158 | 287 | 287 | 338 | 1 | 36 | 37 | 315 |
| 35 | HDPBA28 | PTA-163 Jun. 01, 1999 | pCMVSport 3.0 | 45 | 3447 | 197 | 3447 | 259 | 259 | 339 | 1 | 32 | 33 | 941 |
| 35 | HDPBA28 | PTA-163 Jun. 01, 1999 | pCMVSport 3.0 | 214 | 4909 | 1 | 4909 | 69 | 69 | 508 | 1 | 32 | 33 | 941 |
| 36 | HDPCO25 | 209125 Jun. 19, 1997 | pCMVSport 3.0 | 46 | 767 | 76 | 767 | 182 | 182 | 340 | 1 | 20 | 21 | 53 |
| 37 | HDPCY37 | 209568 Jan. 06, 1998 | pCMVSport 3.0 | 47 | 1932 | 45 | 1932 | 76 | 76 | 341 | 1 | 21 | 22 | 578 |
| 37 | HDPCY37 | 209568 Jan. 06, 1998 | pCMVSport 3.0 | 215 | 1931 | 45 | 1931 | 76 | 76 | 509 | 1 | 21 | 22 | 264 |
| 38 | HDPHI51 | 209125 Jun. 19, 1997 | pCMVSport 3.0 | 48 | 728 | 1 | 728 | 245 | 245 | 342 | 1 | 30 | 31 | 40 |
| 39 | HDPND46 | 209627 Feb. 12, 1998 | pCMVSport 3.0 | 49 | 1727 | 1 | 1727 | 15 | 15 | 343 | 1 | 22 | 23 | 484 |
| 40 | HDPOH06 | 209745 Apr. 07, 1998 | pCMVSport 3.0 | 50 | 2504 | 1 | 2504 | 252 | 252 | 344 | 1 | 29 | 30 | 242 |
| 41 | HDPSP54 | 209782 Apr. 20, 1998 | pCMVSport 3.0 | 51 | 3091 | 2304 | 3091 | 2356 | 2356 | 345 | 1 | 18 | 19 | 48 |
| 41 | HDPSP54 | 209782 Apr. 20, 1998 | pCMVSport 3.0 | 216 | 536 | 1 | 536 | 179 | 179 | 510 | 1 | 41 | 42 | 55 |
| 42 | HDPVH60 | 203105 Aug. 13, 1998 | pCMVSport 3.0 | 52 | 3116 | 1 | 3100 | 8 | 8 | 346 | 1 | 45 | 46 | 51 |
| 43 | HDPWN93 | PTA-868 Oct. 26, 1999 | pCMVSport 3.0 | 53 | 2679 | 1 | 2669 | 45 | 45 | 347 | 1 | 19 | 20 | 802 |
| 43 | HDPWN93 | PTA-868 Oct. 26, 1999 | pCMVSport 3.0 | 217 | 716 | 1 | 716 | 35 | 35 | 511 | 1 | 19 | 20 | 214 |
| 43 | HDPWN93 | PTA-868 Oct. 26, 1999 | pCMVSport 3.0 | 218 | 2716 | 26 | 2716 | 27 | 27 | 512 | 1 | 19 | 20 | 43 |
| 44 | HDQHD03 | 203570 Jan. 11, 1999 | pCMVSport 3.0 | 54 | 1266 | 1 | 1266 | 274 | 274 | 348 | 1 | 20 | 21 | 331 |
| 44 | HDQHD03 | 203570 Jan. 11, 1999 | pCMVSport 3.0 | 219 | 1257 | 1 | 1257 | 259 | 259 | 513 | 1 | 20 | 21 | 333 |
| 45 | HE2EN04 | 209300 Sep. 25, 1997 | Uni-ZAP XR | 55 | 370 | 1 | 370 | 57 | 57 | 349 | 1 | 16 | 17 | 50 |
| 46 | HE8QV67 | PTA-2072 Jun. 09, 2000 | Uni-ZAP XR | 56 | 1999 | 643 | 1999 | 502 | 502 | 350 | 1 | 49 | 50 | 80 |
| 46 | HE8QV67 | PTA-2072 Jun. 09, 2000 | Uni-ZAP XR | 220 | 2342 | 1956 | 2276 | | 256 | 514 | 1 | 1 | 2 | 415 |
| 47 | HE8UB86 | 203570 Jan. 11, 1999 | Uni-ZAP XR | 57 | 1021 | 1 | 1021 | 201 | 201 | 351 | 1 | 21 | 22 | 250 |
| 48 | HE9BK23 | 209683 Mar. 20, 1998 | Uni-ZAP XR | 58 | 1636 | 1 | 1636 | 39 | 39 | 352 | 1 | 21 | 22 | 309 |
| 49 | HEBBN36 | 209141 Jul. 09, 1997 | Uni-ZAP XR | 59 | 1046 | 470 | 1046 | 645 | 645 | 353 | 1 | 29 | 30 | 53 |
| 50 | HEQCC55 | 209965 Jun. 11, 1998 | pCMVSport 3.0 | 60 | 1000 | 1 | 1000 | 25 | 25 | 354 | 1 | 27 | 28 | 129 |
| 50 | HEQCC55 | 209965 Jun. 11, 1998 | pCMVSport 3.0 | 221 | 1052 | 30 | 1052 | 62 | 62 | 515 | 1 | 27 | 28 | 112 |
| 50 | HEQCC55 | 209965 Jun. 11, 1998 | pCMVSport 3.0 | 222 | 1037 | 1 | 1037 | 57 | 57 | 515 | 1 | 27 | 28 | 155 |
| 51 | HESAJ10 | 209242 Sep. 12, 1997 | Uni-ZAP XR | 61 | 1090 | 400 | 1090 | 405 | 405 | 355 | 1 | 23 | 24 | 71 |
| 52 | HETEU28 | PTA-842 Oct. 13, 1999 | Uni-ZAP XR | 62 | 1381 | 1 | 1381 | 256 | 256 | 356 | 1 | 34 | 35 | 153 |
| 52 | HETEU28 | PTA-842 Oct. 13, 1999 | Uni-ZAP XR | 223 | 1501 | 1 | 1462 | 331 | 331 | 517 | 1 | 34 | 35 | 153 |
| 53 | HFABG18 | PTA-1544 Mar. 21, 2000 | Uni-ZAP XR | 63 | 1345 | 1 | 1345 | 53 | 53 | 357 | 1 | 26 | 27 | 87 |
| 54 | HFAMB72 | 209146 Jul. 17, 1997 | Uni-ZAP XR | 64 | 1323 | 509 | 1323 | 559 | 559 | 358 | 1 | 22 | 23 | 60 |
| 55 | HFCCQ50 | 209463 Nov. 14, 1997 | Uni-ZAP XR | 65 | 1271 | 1 | 1271 | 47 | 47 | 359 | 1 | 20 | 21 | 352 |
| 56 | HFIIZ70 | PTA-846 Oct. 13, 1999 | pSport1 | 66 | 1408 | 1 | 1408 | 24 | 24 | 360 | 1 | 23 | 24 | 47 |
| 56 | HFIIZ70 | PTA-846 Oct. 13, 1999 | pSport1 | 224 | 1441 | 43 | 1441 | 74 | 74 | 518 | 1 | 23 | 24 | 47 |
| 57 | HFKET18 | PTA-622 Sep. 02, 1999 | Uni-ZAP XR | 67 | 2407 | 1 | 2407 | 137 | 137 | 361 | 1 | 14 | 15 | 74 |
| 58 | HFLNB64 | 209463 Nov. 14, 1997 | Uni-ZAP XR | 68 | 648 | 1 | 648 | 62 | 62 | 362 | 1 | 39 | 40 | 45 |
| 59 | HFOXA73 | 209277 Sep. 18, 1997 | pSport1 | 69 | 540 | 1 | 540 | 25 | 25 | 363 | 1 | 17 | 18 | 52 |
| 59 | HFOXA73 | 209277 Sep. 18, 1997 | pSport1 | 225 | 539 | 1 | 539 | 15 | 15 | 519 | 1 | | | 17 |
| 60 | HFPAC12 | 209511 Dec. 03, 1997 | Uni-ZAP XR | 70 | 1088 | 1 | 1088 | 140 | 140 | 364 | 1 | 21 | 22 | 88 |
| 61 | HFPAO71 | 209626 Feb. 12, 1998 | Uni-ZAP XR | 71 | 2067 | 364 | 2067 | 414 | 414 | 365 | 1 | 33 | 34 | 131 |
| 62 | HFPCX36 | 209242 Sep. 12, 1997 | Uni-ZAP XR | 72 | 796 | 1 | 796 | 103 | 103 | 366 | 1 | 27 | 28 | 46 |
| 63 | HFPCX64 | 209878 May 18, 1998 | Uni-ZAP XR | 73 | 1076 | 1 | 1076 | 181 | 181 | 367 | 1 | 28 | 29 | 87 |
| 63 | HFPCX64 | 209878 May 18, 1998 | Uni-ZAP XR | 226 | 1069 | 1 | 1069 | 181 | 181 | 520 | 1 | 28 | 29 | 181 |
| 63 | HFPCX64 | 209878 May 18, 1998 | Uni-ZAP XR | 227 | 1154 | 84 | 1154 | 257 | 257 | 521 | 1 | 28 | 29 | 87 |
| 63 | HFPCX64 | 209878 May 18, 1998 | Uni-ZAP XR | 228 | 1197 | 85 | 1197 | 257 | 257 | 522 | 1 | 28 | 29 | 87 |
| 64 | HFTBM50 | 209300 Sep. 25, 1997 | Uni-ZAP XR | 74 | 762 | 1 | 740 | 158 | 158 | 368 | 1 | 20 | 21 | 34 |
| 65 | HFXDJ75 | 209603 Jan. 29, 1998 | Lambda ZAP II | 75 | 1918 | 1 | 1914 | 44 | 44 | 369 | 1 | 26 | 27 | 41 |
| 66 | HFXJU68 | 209423 Oct. 30, 1997 | Lambda ZAP II | 76 | 712 | 1 | 712 | 141 | 141 | 370 | 1 | 26 | 27 | 162 |
| 66 | HFXJU68 | 209423 Oct. 30, 1997 | Lambda ZAP II | 229 | 1347 | 1 | 1347 | 148 | 148 | 523 | 1 | 25 | 26 | 66 |
| 67 | HGBIB74 | 203648 Feb. 09, 1999 | Uni-ZAP XR | 77 | 1816 | 1 | 1804 | 14 | 14 | 371 | 1 | 23 | 24 | 377 |
| 67 | HGBIB74 | 203648 Feb. 09, 1999 | Uni-ZAP XR | 230 | 1821 | 1 | 1821 | 28 | 28 | 524 | 1 | 20 | 21 | 170 |
| 67 | HGBIB74 | 203648 Feb. 09, 1999 | Uni-ZAP XR | 231 | 1094 | 1 | 1094 | | 2 | 525 | 1 | 1 | 2 | 151 |
| 68 | HHEMA75 | 209179 Jul. 24, 1997 | pCMVSport 3.0 | 78 | 865 | 229 | 865 | 569 | 569 | 372 | 1 | 35 | 36 | 84 |
| 69 | HHENK42 | 209195 Aug. 01, 1997 | pCMVSport 3.0 | 79 | 656 | 1 | 656 | 63 | 63 | 373 | 1 | 7 | 8 | 42 |
| 70 | HHEPM33 | PTA-322 Jul. 09, 1999 | pCMVSport 3.0 | 80 | 1459 | 1 | 1459 | 269 | 269 | 374 | 1 | 20 | 21 | 82 |
| 71 | HHEPT60 | 209138 Jul. 03, 1997 | pCMVSport 3.0 | 81 | 532 | 21 | 532 | 245 | 245 | 375 | 1 | 18 | 19 | 36 |
| 72 | HHFHJ59 | 97975 Apr. 04, 1997 | Uni-ZAP XR | 82 | 661 | 1 | 661 | 192 | 192 | 376 | 1 | 29 | 30 | 112 |
| | | 209081 May 29, 1997 | | | | | | | | | | | | |
| 73 | HHGDW43 | 209346 Oct. 09, 1997 | Lambda ZAP II | 83 | 1050 | 1 | 1050 | 107 | 107 | 377 | 1 | 40 | 41 | 44 |
| 74 | HHPEC09 | 209877 May 18, 1998 | Uni-ZAP XR | 84 | 488 | 1 | 488 | 71 | 71 | 378 | 1 | 19 | 20 | 55 |
| 75 | HHPTJ65 | 209179 Jul. 24, 1997 | Uni-ZAP XR | 85 | 515 | 1 | 515 | 247 | 247 | 379 | 1 | 32 | 33 | 48 |
| 76 | HJABX32 | 209146 Jul. 17, 1997 | pBLUESCRIPT ™ | 86 | 1061 | 454 | 1061 | 557 | 557 | 380 | 1 | 18 | 19 | 51 |
| | | | SK− | | | | | | | | | | | |
| 77 | HJBCU04 | PTA-322 | pBLUESCRIPT ™ | 87 | 1192 | 1 | 1192 | 96 | 96 | 381 | 1 | 49 | 50 | 176 |
| | | Jul. 09, 1999 | SK− | | | | | | | | | | | |
| 78 | HJMBN89 | 209407 Oct. 23, 1997 | pCMVSport 3.0 | 88 | 1064 | 306 | 1064 | 348 | 348 | 382 | 1 | 13 | 14 | 56 |
| 79 | HJMBW30 | 209146 Jul. 17, 1997 | pCMVSport 3.0 | 89 | 884 | 1 | 874 | 110 | 110 | 383 | 1 | 18 | 19 | 42 |
| 80 | HKAB184 | 209603 Jan. 29, 1998 | pCMVSport 2.0 | 90 | 1238 | 45 | 1238 | 274 | 274 | 384 | 1 | 16 | 17 | 47 |
| 81 | HKACB56 | 209346 Oct. 09, 1997 | pCMVSport 2.0 | 91 | 496 | 1 | 496 | 27 | 27 | 385 | 1 | 23 | 24 | 80 |
| 82 | HKACM93 | PTA-849 Oct. 13, 1999 | pCMVSport 2.0 | 92 | 2352 | 1 | 2352 | 218 | 218 | 386 | 1 | 30 | 31 | 692 |
| 82 | HKACM93 | PTA-849 Oct. 13, 1999 | pCMVSport 2.0 | 232 | 549 | 1 | 549 | 189 | 189 | 526 | 1 | 30 | 31 | 120 |
| 82 | HKACM93 | PTA-849 Oct. 13, 1999 | pCMVSport 2.0 | 233 | 1120 | 1 | 1120 | 314 | 314 | 527 | 1 | 30 | 31 | 269 |
| 82 | HKACM93 | PTA-849 Oct. 13, 1999 | pCMVSport 2.0 | 234 | 1893 | 739 | 1893 | | 202 | 528 | 1 | 13 | 14 | 17 |
| 82 | HKACM93 | PTA-849 Oct. 13, 1999 | pCMVSport 2.0 | 235 | 1187 | 1 | 1187 | | 638 | 529 | 1 | 4 | 5 | 45 |
| 83 | HKADQ91 | 209568 Jan. 06, 1998 | pCMVSport 2.0 | 93 | 1523 | 30 | 1517 | 229 | 229 | 387 | 1 | 25 | 26 | 275 |
| 84 | HKAEG43 | 209965 Jun. 11, 1998 | pCMVSport 2.0 | 94 | 1297 | 1 | 1297 | 32 | 32 | 388 | 1 | 29 | 30 | 70 |
| 84 | HKAEG43 | 209965 Jun. 11, 1998 | pCMVSport 2.0 | 236 | 1286 | 1 | 1286 | 21 | 21 | 530 | 1 | 29 | 30 | 70 |
| 85 | HKDBF34 | 209511 Dec. 03, 1997 | pCMVSport 1 | 95 | 1432 | 60 | 1418 | 69 | 69 | 389 | 1 | 14 | 15 | 222 |
| 85 | HKDBF34 | 209511 Dec. 03, 1997 | pCMVSport 1 | 237 | 1356 | 1 | 1356 | 18 | 18 | 531 | 1 | 19 | 20 | 104 |
| 86 | HKISB57 | 209603 Jan. 29, 1998 | pBLUESCRIPT ™ | 96 | 1492 | 1 | 1439 | 130 | 130 | 390 | 1 | 19 | 20 | 95 |
| 87 | HKIYP40 | 209463 Nov. 14, 1997 | pBLUESCRIPT ™ | 97 | 1215 | 1 | 1215 | 43 | 43 | 391 | 1 | 32 | 33 | 76 |
| 88 | HKMLK53 | 209511 Dec. 03, 1997 | pBLUESCRIPT ™ | 98 | 1543 | 1 | 1543 | 20 | 20 | 392 | 1 | 25 | 26 | 69 |
| 89 | HLDON23 | 209628 Feb. 12, 1998 | pCMVSport 3.0 | 99 | 1262 | 208 | 1256 | 368 | 368 | 393 | 1 | 20 | 21 | 113 |
| 90 | HLDOW79 | PTA-1544 Mar. 21, 2000 | pCMVSport 3.0 | 100 | 989 | 1 | 989 | 43 | 43 | 394 | 1 | 21 | 22 | 275 |
| 91 | HLJBJ61 | PTA-848 Oct. 13, 1999 | pCMVSport 1 | 101 | 1191 | 1 | 1191 | 158 | 158 | 395 | 1 | 29 | 30 | 38 |
| 91 | HLJBJ61 | PTA-848 Oct. 13, 1999 | pCMVSport 1 | 238 | 628 | 1 | 628 | 227 | 227 | 532 | 1 | 29 | 30 | 38 |
| 92 | HLQDH79 | 209551 Dec. 12, 1997 | Lambda ZAP II | 102 | 913 | 1 | 913 | 205 | 205 | 396 | 1 | 19 | 20 | 58 |
| 93 | HLTHG37 | 209965 Jun. 11, 1998 | Uni-ZAP XR | 103 | 3740 | 1908 | 3740 | 50 | 50 | 397 | 1 | 1 | 2 | 319 |
| 93 | HLTHG37 | 209965 Jun. 11, 1998 | Uni-ZAP XR | 239 | 1932 | 98 | 1932 | 313 | 313 | 533 | 1 | 35 | 36 | 42 |
| 94 | HLWAE11 | 203071 Jul. 27, 1998 | pCMVSport 3.0 | 104 | 1618 | 1 | 1618 | 28 | 28 | 398 | 1 | 46 | 47 | 278 |
| 95 | HLWAY54 | 209651 Mar. 04, 1998 | pCMVSport 3.0 | 105 | 1892 | 1 | 1892 | 38 | 38 | 399 | 1 | 25 | 26 | 338 |
| 96 | HLWCF05 | 209126 Jun. 19, 1997 | pCMVSport 3.0 | 106 | 646 | 1 | 646 | 155 | 155 | 400 | 1 | 36 | 37 | 58 |
| 97 | HLYAF80 | 209126 Jun. 19, 1997 | pSport1 | 107 | 826 | 1 | 826 | 222 | 222 | 401 | 1 | 24 | 25 | 47 |
| 98 | HLYAZ61 | 209022 May 08, 1997 | pSport1 | 108 | 1237 | 1 | 1237 | 190 | 190 | 402 | 1 | 18 | 19 | 222 |
| 98 | HLYAZ61 | 209022 May 08, 1997 | pSport1 | 240 | 997 | 74 | 997 | 205 | 205 | 534 | 1 | 18 | 19 | 215 |
| 99 | HMADS41 | 209563 Dec. 18, 1997 | Uni-ZAP XR | 109 | 1267 | 1 | 1267 | 267 | 267 | 403 | 1 | 21 | 22 | 88 |
| 100 | HMADU73 | 209139 Jul. 03, 1997 | Uni-ZAP XR | 110 | 3194 | 1 | 3194 | 491 | 491 | 404 | 1 | 16 | 17 | 713 |
| 100 | HMADU73 | 209139 Jul. 03, 1997 | Uni-ZAP XR | 241 | 437 | 1 | 437 | 115 | 115 | 535 | 1 | 15 | 16 | 77 |
| 101 | HMIAL37 | 209563 Dec. 18, 1997 | Uni-ZAP XR | 111 | 1420 | 1 | 1420 | 49 | 49 | 405 | 1 | 13 | 14 | 97 |
| 102 | HMKCG09 | 209346 Oct. 09, 1997 | pSport1 | 112 | 921 | 60 | 921 | 221 | 221 | 406 | 1 | 28 | 29 | 49 |
| 103 | HMMAH60 | 209368 Oct. 16, 1997 | pSport1 | 113 | 822 | 1 | 822 | 142 | 142 | 407 | 1 | 15 | 16 | 50 |
| 104 | HMQDT36 | 209022 May 08, 1997 | Uni-ZAP XR | 114 | 1871 | 1 | 1871 | 157 | 157 | 408 | 1 | 32 | 33 | 406 |
| 104 | HMQDT36 | 209022 May 08, 1997 | Uni-ZAP XR | 242 | 1914 | 37 | 1897 | 192 | 192 | 536 | 1 | 32 | 33 | 406 |
| 105 | HMSHS36 | PTA-2070 Jun. 09, 2000 | Uni-ZAP XR | 115 | 1402 | 1 | 1402 | 134 | 134 | 409 | 1 | 23 | 24 | 103 |
| 105 | HMSHS36 | PTA-2070 Jun. 09, 2000 | Uni-ZAP XR | 243 | 616 | 30 | 616 | 162 | 162 | 537 | 1 | 23 | 24 | 103 |
| 106 | HMSJU68 | 209076 May 22, 1997 | Uni-ZAP XR | 116 | 1123 | 4 | 1123 | 272 | 272 | 410 | 1 | 31 | 32 | 49 |
| 107 | HMSKC04 | 203105 Aug. 13, 1998 | Uni-ZAP XR | 117 | 1417 | 1 | 1417 | 133 | 133 | 411 | 1 | 22 | 23 | 73 |
| 108 | HMTAD67 | 209551 Dec. 12, 1997 | pCMVSport 3.0 | 118 | 1173 | 1 | 1173 | 306 | 306 | 412 | 1 | 19 | 20 | 84 |
| 109 | HMWFO02 | 209324 Oct. 02, 1997 | Uni-ZAP XR | 119 | 547 | 1 | 547 | 7 | 7 | 413 | 1 | 37 | 38 | 68 |
| 109 | HMWFO02 | 209324 Oct. 02, 1997 | Uni-ZAP XR | 244 | 708 | 1 | 708 | 20 | 20 | 538 | 1 | 38 | 39 | 60 |
| 110 | HMWFY10 | 209147 Jul. 17, 1997 | Uni-ZAP XR | 120 | 556 | 1 | 556 | 367 | 367 | 414 | 1 | 15 | 16 | 30 |
| 110 | HMWFY10 | 209147 Jul. 17, 1997 | Uni-ZAP XR | 245 | 556 | 1 | 556 | | 129 | 539 | 1 | 9 | 10 | 18 |
| 111 | HNGBT31 | 97976 Apr. 04, 1997 | Uni-ZAP XR | 121 | 639 | 1 | 639 | 224 | 224 | 415 | 1 | 28 | 29 | 104 |
| 112 | HNGEO29 | 209299 Sep. 25, 1997 | Uni-ZAP XR | 122 | 491 | 1 | 491 | 98 | 98 | 416 | 1 | 32 | 33 | 44 |
| 113 | HNGIQ46 | 209243 Sep. 12, 1997 | Uni-ZAP XR | 123 | 527 | 1 | 527 | 221 | 221 | 417 | 1 | 21 | 22 | 70 |
| 114 | HNGJP69 | 209603 Jan. 29, 1998 | Uni-ZAP XR | 124 | 985 | 1 | 985 | 321 | 321 | 418 | 1 | 14 | 15 | 74 |
| 115 | HNGOI12 | PTA-847 Oct. 13, 1999 | Uni-ZAP XR | 125 | 2128 | 1 | 2128 | 27 | 27 | 419 | 1 | 34 | 35 | 57 |
| 115 | HNGOI12 | PTA-847 Oct. 13, 1999 | Uni-ZAP XR | 246 | 774 | 1 | 774 | 27 | 27 | 540 | 1 | 34 | 35 | 57 |
| 115 | HNGOI12 | PTA-847 Oct. 13, 1999 | Uni-ZAP XR | 247 | 1396 | 1 | 1396 | | 596 | 541 | 1 | 25 | 26 | 93 |
| 116 | HNHOD46 | PTA-1543 Mar. 21, 2000 | Uni-ZAP XR | 126 | 1355 | 1 | 1355 | 12 | 12 | 420 | 1 | 20 | 21 | 80 |
| 117 | HNTBL27 | 209324 Oct. 02, 1997 | pCMVSport 3.0 | 127 | 791 | 71 | 791 | 100 | 100 | 421 | 1 | 23 | 24 | 115 |
| 118 | HNTN101 | 209782 Apr. 20, 1998 | pSport1 | 128 | 2087 | 1 | 2087 | 307 | 307 | 422 | 1 | 33 | 34 | 76 |
| 118 | HNTN101 | 209782 Apr. 20, 1998 | pSport1 | 248 | 1274 | 1 | 1114 | 306 | 306 | 534 | 1 | 33 | 34 | 49 |
| 119 | HOAAC90 | 209236 Sep. 04, 1997 | Uni-ZAP XR | 129 | 642 | 1 | 642 | 33 | 33 | 423 | 1 | 15 | 16 | 104 |
| 119 | HOAAC90 | 209236 Sep. 04, 1997 | Uni-ZAP XR | 249 | 652 | 1 | 652 | 38 | 38 | 543 | 1 | 15 | 16 | 104 |
| 120 | HOCNF19 | 203570 Jan. 11, 1999 | pSport1 | 130 | 1118 | 1 | 1118 | 166 | 166 | 424 | 1 | 20 | 21 | 87 |
| 121 | HODDW40 | 209463 Nov. 14, 1997 | Uni-ZAP XR | 131 | 682 | 1 | 682 | 139 | 139 | 425 | 1 | 19 | 20 | 40 |
| 122 | HODFN71 | 203570 Jan. 11, 1999 | Uni-ZAP XR | 132 | 1126 | 1 | 1126 | | 1 | 426 | 1 | 1 | 2 | 159 |
| 122 | HODFN71 | 203570 Jan. 11, 1999 | Uni-ZAP XR | 250 | 1124 | 1 | 1124 | 27 | 27 | 544 | 1 | 18 | 19 | 148 |
| 123 | HOEBZ89 | 203517 Dec. 10, 1998 | Uni-ZAP XR | 133 | 2520 | 1 | 2520 | 19 | 19 | 427 | 1 | 21 | 22 | 333 |
| 124 | HOEDB32 | 209628 Feb. 12, 1998 | Uni-ZAP XR | 134 | 1462 | 73 | 1462 | 104 | 104 | 428 | 1 | 21 | 22 | 226 |
| 125 | HOEDH84 | 209965 Jun. 11, 1998 | Uni-ZAP XR | 135 | 2079 | 1 | 2079 | 256 | 256 | 429 | 1 | 20 | 21 | 404 |
| 126 | HOFNC14 | PTA-623 Sep. 02, 1999 | pCMVSport 2.0 | 136 | 2794 | 1 | 2794 | 79 | 79 | 430 | 1 | 13 | 14 | 73 |
| 126 | HOFNC14 | PTA-623 Sep. 02, 1999 | pCMVSport 2.0 | 251 | 3095 | 1 | 3095 | 155 | 155 | 545 | 1 | 13 | 14 | 72 |
| 127 | HOFND85 | PTA-1544 Mar. 21, 2000 | pCMVSport 2.0 | 137 | 2048 | 1 | 2048 | 167 | 167 | 431 | 1 | 22 | 23 | 627 |
| 128 | HOFOC33 | PTA-848 Oct. 13, 1999 | pCMVSport 2.0 | 138 | 1669 | 1 | 1669 | 76 | 76 | 432 | 1 | 21 | 22 | 363 |
| 128 | HOFOC33 | PTA-848 Oct. 13, 1999 | pCMVSport 2.0 | 252 | 518 | 1 | 518 | 81 | 81 | 546 | 1 | 21 | 22 | 112 |
| 128 | HOFOC33 | PTA-848 Oct. 13, 1999 | pCMVSport 2.0 | 253 | 518 | 1 | 518 | 81 | 81 | 547 | 1 | 17 | 18 | 112 |
| 128 | HOFOC33 | PTA-848 Oct. 13, 1999 | pCMVSport 2.0 | 254 | 1670 | 1 | 1670 | 76 | 76 | 548 | 1 | 21 | 22 | 139 |
| 128 | HOFOC33 | PTA-848 Oct. 13, 1999 | pCMVSport 2.0 | 255 | 606 | 1 | 606 | | 23 | 549 | 1 | | | 7 |
| 128 | HOFOC33 | PTA-848 Oct. 13, 1999 | pCMVSport 2.0 | 256 | 841 | 1 | 841 | | 158 | 550 | 1 | 6 | 7 | 14 |
| 128 | HOFOC33 | PTA-848 Oct. 13, 1999 | pCMVSport 2.0 | 257 | 868 | 1 | 847 | | 3 | 551 | 1 | 1 | 2 | 288 |
| 129 | HOGCK20 | 209853 May 07, 1998 | pCMVSport 2.0 | 139 | 2087 | 1 | 2087 | 57 | 57 | 433 | 1 | 23 | 24 | 522 |
| 129 | HOGCK20 | 209853 May 07, 1998 | pCMVSport 2.0 | 258 | 2075 | 1 | 2054 | | 53 | 552 | 1 | 22 | 23 | 554 |
| 130 | HOGCS52 | PTA-848 Oct. 13, 1999 | pCMVSport 2.0 | 140 | 2571 | 1 | 2571 | 25 | 25 | 434 | 1 | 22 | 23 | 453 |
| 130 | HOGCS52 | PTA-848 Oct. 13, 1999 | pCMVSport 2.0 | 259 | 2645 | 1 | 2586 | 30 | 30 | 553 | 1 | 22 | 23 | 453 |
| 130 | HOGCS52 | PTA-848 Oct. 13, 1999 | pCMVSport 2.0 | 260 | 1098 | 457 | 638 | | 2 | 554 | 1 | 1 | 2 | 96 |
| 131 | HOUCQ17 | 209086 May 29, 1997 | Uni-ZAP XR | 141 | 4712 | 1 | 4693 | 508 | 508 | 435 | 1 | 51 | 52 | 967 |
| 132 | HOUDK26 | 209423 Oct. 30, 1997 | Uni-ZAP XR | 142 | 1051 | 1 | 1051 | 214 | 214 | 436 | 1 | 30 | 31 | 174 |
| 133 | HOVCA92 | 209299 Sep. 25, 1997 | pSport1 | 143 | 707 | 1 | 488 | 181 | 181 | 437 | 1 | 20 | 21 | 62 |
| 134 | HPJBK12 | PTA-855 Oct. 18, 1999 | Uni-ZAP XR | 144 | 2648 | 1 | 2648 | 126 | 126 | 438 | 1 | 18 | 19 | 48 |
| 134 | HPJBK12 | PTA-855 Oct. 18, 1999 | Uni-ZAP XR | 261 | 538 | 1 | 538 | 119 | 119 | 555 | 1 | 18 | 19 | 48 |
| 134 | HPJBK12 | PTA-855 Oct. 18, 1999 | Uni-ZAP XR | 262 | 1346 | 1 | 1346 | | 969 | 556 | 1 | | | 10 |
| 134 | HPJBK12 | PTA-855 Oct. 18, 1999 | Uni-ZAP XR | 263 | 912 | 1 | 912 | 509 | 509 | 557 | 1 | | | 4 |
| 135 | HPJEX20 | PTA-872 Oct. 26, 1999 | Uni-ZAP XR | 145 | 566 | 1 | 566 | 23 | 23 | 439 | 1 | 26 | 27 | 174 |
| 135 | HPJEX20 | PTA-872 Oct. 26, 1999 | Uni-ZAP XR | 264 | 1823 | 1 | 1823 | 31 | 31 | 558 | 1 | 23 | 24 | 115 |
| 135 | HPJEX20 | PTA-872 Oct. 26, 1999 | Uni-ZAP XR | 265 | 1964 | 1 | 1964 | 170 | 170 | 559 | 1 | 23 | 24 | 174 |
| 135 | HPJEX20 | PTA-872 Oct. 26, 1999 | Uni-ZAP XR | 266 | 769 | 1 | 769 | 84 | 84 | 560 | 1 | 23 | 24 | 228 |
| 135 | HPJEX20 | PTA-872 Oct. 26, 1999 | Uni-ZAP XR | 267 | 818 | 1 | 818 | | 565 | 561 | 1 | 1 | 2 | 84 |
| 136 | HPMA122 | 209683 Mar. 20, 1998 | Uni-ZAP XR | 146 | 1274 | 334 | 1274 | 483 | 483 | 440 | 1 | 16 | 17 | 59 |
| 137 | HPRBC80 | 209852 May 07, 1998 | Uni-ZAP XR | 147 | 2543 | 1245 | 2543 | 94 | 94 | 441 | 1 | 30 | 31 | 387 |
| 137 | HPRBC80 | 209852 May 07, 1998 | Uni-ZAP XR | 268 | 2052 | 275 | 2032 | 404 | 404 | 562 | 1 | 26 | 27 | 69 |
| 138 | HPRSB76 | 209244 Sep. 12, 1997 | pBLUESCRIPT ™ | 148 | 741 | 1 | 741 | 127 | 127 | 442 | 1 | 22 | 23 | 59 |
| 139 | HPWAY46 | PTA-843 Oct. 13, 1999 | Uni-ZAP XR | 149 | 1414 | 1 | 1414 | 468 | 468 | 443 | 1 | 30 | 31 | 52 |
| 139 | HPWAY46 | PTA-843 Oct. 13, 1999 | Uni-ZAP XR | 269 | 891 | 1 | 891 | 474 | 474 | 563 | 1 | 30 | 31 | 52 |
| 139 | HPWAY46 | PTA-843 Oct. 13, 1999 | Uni-ZAP XR | 270 | 501 | 120 | 501 | | 178 | 564 | 1 | 1 | 2 | 86 |
| 140 | HPWAZ95 | 209007 Apr. 28, 97 | Uni-ZAP XR | 150 | 323 | 1 | 323 | 88 | 88 | 444 | 1 | 27 | 28 | 78 |
| | | 209083 May 29, 1997 | | | | | | | | | | | | |
| 141 | HRACD15 | 209852 May. 07, 1998 | pCMVSport 3.0 | 151 | 1539 | 24 | 1539 | 252 | 252 | 445 | 1 | 40 | 41 | 53 |
| 141 | HRACD15 | 209852 May. 07, 1998 | pCMVSport 3.0 | 271 | 1681 | 24 | 1453 | 252 | 252 | 565 | 1 | 40 | 41 | 53 |
| 142 | HRDFD27 | 209423 Oct. 30, 1997 | Uni-ZAP XR | 152 | 805 | 1 | 805 | 82 | 82 | 446 | 1 | 35 | 36 | 83 |
| 143 | HSAVD46 | 209124 Jun. 19, 1997 | Uni-ZAP XR | 153 | 773 | 2 | 767 | 155 | 155 | 447 | 1 | 20 | 21 | 58 |
| 144 | HSAWZ41 | 209463 Nov. 14, 1997 | Uni-ZAP XR | 154 | 1388 | 1 | 1388 | 98 | 98 | 448 | 1 | 24 | 25 | 57 |
| 145 | HSAYM40 | 209139 Jul. 03, 1997 | Uni-ZAP XR | 155 | 433 | 1 | 433 | 190 | 190 | 449 | 1 | 19 | 20 | 63 |
| 146 | HSDEZ20 | 209852 May. 07, 1998 | Uni-ZAP XR | 156 | 795 | 1 | 795 | 58 | 58 | 450 | 1 | 41 | 42 | 122 |
| 146 | HSDEZ20 | 209852 May. 07, 1998 | Uni-ZAP XR | 272 | 1540 | 1 | 1540 | 66 | 66 | 566 | 1 | 41 | 42 | 97 |
| 147 | HSDJA15 | 203081 Jul. 30, 1998 | Uni-ZAP XR | 157 | 1443 | 1 | 1443 | 247 | 247 | 451 | 1 | 20 | 21 | 152 |
| 148 | HSDSB09 | 209145 Jul. 17,1997 | pBLUESCRIPT ™ | 158 | 809 | 1 | 809 | 16 | 16 | 452 | 1 | 17 | 18 | 135 |
| 148 | HSDSB09 | 209145 Jul. 17, 1997 | pBLUESCRIPT ™ | 273 | 819 | 1 | 819 | 22 | 22 | 567 | 1 | 17 | 18 | 121 |
| 149 | HSFAM31 | 209346 Oct. 09, 1997 | Uni-ZAP XR | 159 | 868 | 1 | 868 | 44 | 44 | 453 | 1 | | | 9 |
| 150 | HSHAX21 | 209853 May. 07, 1998 | Uni-ZAP XR | 160 | 1986 | 1 | 1986 | 177 | 177 | 454 | 1 | 13 | 14 | 72 |
| 151 | HSQCM10 | 209641 Feb. 25, 1998 | Uni-ZAP XR | 161 | 657 | 1 | 654 | 130 | 130 | 455 | 1 | 19 | 20 | 62 |
| 152 | HSSGD52 | PTA-1543 Mar. 21, 2000 | Uni-ZAP XR | 162 | 2425 | 1 | 2425 | 344 | 344 | 456 | 1 | 32 | 33 | 606 |
| 152 | HSSGD52 | PTA-1543 Mar. 21, 2000 | Uni-ZAP XR | 274 | 2460 | 105 | 2460 | 338 | 338 | 568 | 1 | 27 | 28 | 606 |
| 153 | HSSJC35 | 209853 May 07 1998 | Uni-ZAP XR | 163 | 1174 | 1 | 1174 | 62 | 62 | 457 | 1 | 28 | 29 | 295 |
| 153 | HSSJC35 | 209853 May 07, 1998 | Uni-ZAP XR | 275 | 1163 | 1 | 1163 | 55 | 55 | 569 | 1 | 30 | 31 | 295 |
| 153 | HSSJC35 | 209853 May 07, 1998 | Uni-ZAP XR | 276 | 1183 | 1 | 1183 | 66 | 66 | 570 | 1 | 30 | 31 | 37 |
| 154 | HSXEC75 | 209641 Feb. 25, 1998 | Uni-ZAP XR | 164 | 1112 | 1 | 1112 | 295 | 295 | 458 | 1 | 33 | 34 | 45 |
| 155 | HSYAZ50 | PTA-849 Oct. 13, 1999 | pCMVSport 3.0 | 165 | 1097 | 1 | 1097 | 131 | 131 | 459 | 1 | 18 | 19 | 56 |
| 155 | HSYAZ50 | PTA-849 Oct. 13, 1999 | pCMVSport 3.0 | 277 | 768 | 226 | 768 | 345 | 345 | 571 | 1 | 18 | 19 | 56 |
| 155 | HSYAZ50 | PTA-849 Oct. 13, 1999 | pCMVSport 3.0 | 278 | 2087 | 770 | 875 | | 723 | 572 | 1 | 1 | 2 | 106 |
| 155 | HSYAZ50 | PTA-849 Oct. 13, 1999 | pCMVSport 3.0 | 279 | 2096 | 1767 | 2050 | | 2 | 573 | 1 | 1 | 2 | 279 |
| 156 | HSYBG37 | 209463 Nov. 14, 1997 | pCMVSport 3.0 | 166 | 1238 | 1 | 1238 | 47 | 47 | 460 | 1 | 24 | 25 | 305 |
| 156 | HSYBG37 | 209463 Nov. 14, 1997 | pCMVSport 3.0 | 280 | 1239 | 1 | 1239 | 48 | 48 | 574 | 1 | 24 | 25 | 305 |
| 157 | HSZAF47 | 209124 Jun. 19, 1997 | Uni-ZAP XR | 167 | 1304 | 1 | 1304 | 106 | 106 | 461 | 1 | 16 | 17 | 289 |
| 157 | HSZAF47 | 209124 Jun. 19, 1997 | Uni-ZAP XR | 281 | 1333 | 2 | 1333 | 107 | 107 | 575 | 1 | 18 | 19 | 127 |
| 158 | HTADX17 | 209124 Jun. 19, 1997 | Uni-ZAP XR | 168 | 1147 | 0 | 1148 | 92 | 92 | 462 | 1 | 23 | 24 | 142 |
| 158 | HTADX17 | 209124 Jun. 19, 1997 | Uni-ZAP XR | 282 | 1140 | 22 | 1140 | 84 | 84 | 576 | 1 | 19 | 20 | 142 |
| 159 | HTEAF65 | PTA-322 Jul. 09, 1999 | Uni-ZAP XR | 169 | 563 | 1 | 563 | 135 | 135 | 463 | 1 | 19 | 20 | 75 |
| 160 | HTEB128 | 209177 Jul. 24, 1997 | Uni-ZAP XR | 170 | 413 | 1 | 413 | 43 | 43 | 464 | 1 | 20 | 21 | 67 |
| 161 | HTEHR24 | 209224 Aug. 28, 1997 | Uni-ZAP XR | 171 | 1075 | 50 | 1075 | 84 | 84 | 465 | 1 | 29 | 30 | 163 |
| 161 | HTEHR24 | 209224 Aug. 28, 1997 | Uni-ZAP XR | 283 | 1038 | 1 | 1038 | 41 | 41 | 577 | 1 | 28 | 29 | 124 |
| 162 | HTEHU31 | 209568 Jan. 06, 1998 | Uni-ZAP XR | 172 | 1113 | 1 | 1113 | 121 | 121 | 466 | 1 | 25 | 26 | 312 |
| 163 | HTEHU93 | 209090 Jun. 05, 1997 | Uni-ZAP XR | 173 | 738 | 1 | 738 | 188 | 188 | 467 | 1 | 24 | 25 | 142 |
| 163 | HTEHU93 | 209090 Jun. 05, 1997 | Uni-ZAP XR | 284 | 745 | 1 | 745 | 187 | 187 | 578 | 1 | 24 | 25 | 113 |
| 164 | HTEIP36 | 209244 Sep. 12, 1997 | Uni-ZAP XR | 174 | 752 | 1 | 752 | 22 | 22 | 468 | 1 | 19 | 20 | 58 |
| 165 | HTEIV80 | 209511 Dec. 03, 1997 | Uni-ZAP XR | 175 | 1748 | 1 | 1748 | 203 | 203 | 469 | 1 | 14 | 15 | 47 |
| 166 | HTEPG70 | 203570 Jan. 11, 1999 | Uni-ZAP XR | 176 | 813 | 1 | 813 | 365 | 365 | 470 | 1 | 27 | 28 | 89 |
| 167 | HTHBG43 | PTA-843 Oct. 13, 1999 | Uni-ZAP XR | 177 | 848 | 1 | 848 | 47 | 47 | 471 | 1 | | | 39 |
| 167 | HTHBG43 | PTA-843 Oct. 13, 1999 | Uni-ZAP XR | 285 | 632 | 103 | 632 | 149 | 149 | 579 | 1 | | | 39 |
| 168 | HTJMA95 | 209853 May. 07, 1998 | pCMVSport 2.0 | 178 | 1650 | 198 | 1569 | 527 | 527 | 472 | 1 | 22 | 23 | 181 |
| 169 | HTLFE42 | 209138 Jul. 03, 1997 | Uni-ZAP XR | 179 | 712 | 1 | 712 | 116 | 116 | 473 | 1 | 22 | 23 | 77 |
| 170 | HTLIT32 | 203570 Jan. 11, 1999 | Uni-ZAP XR | 180 | 1074 | 164 | 897 | 288 | 288 | 474 | 1 | 26 | 27 | 246 |
| 171 | HTLIV19 | PTA-2081 Jun. 09, 2000 | Uni-ZAP XR | 181 | 978 | 1 | 978 | 110 | 110 | 475 | 1 | 33 | 34 | 84 |
| 172 | HTOAK16 | 209368 Oct. 16, 1997 | Uni-ZAP XR | 182 | 1466 | 1 | 1466 | 87 | 87 | 476 | 1 | 18 | 19 | 110 |
| 173 | HTOHD42 | 203081 Jul. 30, 1998 | Uni-ZAP XR | 183 | 946 | 1 | 946 | 155 | 155 | 477 | 1 | 24 | 25 | 190 |
| 174 | HTOHM15 | PTA-843 Oct. 13, 1999 | Uni-ZAP XR | 184 | 1949 | 1 | 1949 | 30 | 30 | 478 | 1 | 20 | 21 | 61 |
| 174 | HTOHM15 | PTA-843 | Uni-ZAP XR | 286 | 408 | 1 | 408 | 23 | 23 | 580 | 1 | 20 | 21 | 61 |
| | | Oct. 13, 1999 | | | | | | | | | | | | |
| 174 | HTOHM15 | PTA-843 | Uni-ZAP XR | 287 | 1299 | 982 | 1274 | | 71 | 581 | 1 | 1 | 2 | 322 |
| | | Oct. 13, 1999 | | | | | | | | | | | | |
| 174 | HTOHM15 | PTA-843 | Uni-ZAP XR | 288 | 1669 | 1 | 1622 | | 1555 | 582 | 1 | 9 | 10 | 13 |
| | | Oct. 13, 1999 | | | | | | | | | | | | |
| 175 | HTPBW79 | 209511 Dec. 03, 1997 | Uni-ZAP XR | 185 | 1374 | 1 | 1374 | 178 | 178 | 479 | 1 | 22 | 23 | 362 |
| 175 | HTPBW79 | 209511 Dec. 03, 1997 | Uni-ZAP XR | 289 | 1515 | 118 | 1507 | 302 | 302 | 583 | 1 | 24 | 25 | 362 |
| 175 | HTPBW79 | 209511 Dec. 03, 1997 | Uni-ZAP XR | 290 | 1404 | 1 | 1404 | 92 | 92 | 584 | 1 | 22 | 23 | 415 |
| 176 | HTTDB46 | 203484 Nov. 17, 1998 | Uni-ZAP XR | 186 | 3059 | 1 | 3059 | 55 | 55 | 480 | 1 | 17 | 18 | 318 |
| 176 | HTTDB46 | 203484 Nov. 17, 1998 | Uni-ZAP XR | 291 | 2008 | 215 | 2008 | 153 | 153 | 585 | 1 | 17 | 18 | 461 |
| 177 | HTXCV12 | 209423 Oct. 30, 1997 | Uni-ZAP XR | 187 | 1134 | 1 | 1134 | 175 | 175 | 481 | 1 | 27 | 28 | 102 |
| 177 | HTXCV12 | 209423 Oct. 30, 1997 | Uni-ZAP XR | 292 | 1162 | 1 | 1162 | 183 | 183 | 586 | 1 | 27 | 28 | 91 |
| 178 | HTXDW56 | 209746 Apr. 07, 1998 | Uni-ZAP XR | 188 | 1583 | 1 | 1583 | 217 | 217 | 482 | 1 | 21 | 22 | 201 |
| 179 | HTXFL30 | 209603 Jan. 29, 1998 | Uni-ZAP XR | 189 | 1991 | 1 | 1991 | 30 | 30 | 483 | 1 | 39 | 40 | 102 |
| 180 | HTXKP61 | 203364 Oct. 19, 1998 | Uni-ZAP XR | 190 | 1209 | 1 | 1209 | 169 | 169 | 484 | 1 | 33 | 34 | 42 |
| 181 | HUKAH51 | 209568 Jan. 06, 1998 | Lambda ZAP II | 191 | 853 | 1 | 853 | 286 | 286 | 485 | 1 | 20 | 21 | 151 |
| 181 | HUKAH51 | 209568 Jan. 06, 1998 | Lambda ZAP II | 293 | 754 | 1 | 754 | 144 | 144 | 587 | 1 | 22 | 23 | 142 |
| 181 | HUKAH51 | 209568 Jan. 06, 1998 | Lambda ZAP II | 294 | 667 | 1 | 667 | 55 | 55 | 588 | 1 | 22 | 23 | 119 |
| 182 | HUKBT29 | 209746 Apr. 07, 1998 | Lambda ZAP II | 192 | 1757 | 56 | 1757 | 74 | 74 | 486 | 1 | 19 | 20 | 506 |
| 183 | HUSBA88 | PTA-623 | Lambda ZAP II | 193 | 2733 | 27 | 2733 | 270 | 270 | 487 | 1 | 15 | 16 | 615 |
| | | Sep. 02, 1999 | | | | | | | | | | | | |
| 184 | HWBAR88 | PTA-867 | pCMVSport 3.0 | 194 | 1051 | 1 | 1051 | 156 | 156 | 488 | 1 | 18 | 19 | 75 |
| | | Oct. 26, 1999 | | | | | | | | | | | | |
| 185 | HWBCB89 | PTA-499 | pCMVSport 3.0 | 195 | 1317 | 3 | 1317 | 37 | 37 | 489 | 1 | 19 | 20 | 187 |
| | | Aug. 11, 1999 | | | | | | | | | | | | |
| 185 | HWBCB89 | PTA-499 Aug. 11, 1999 | pCMVSport 3.0 | 295 | 1315 | 1 | 1315 | 35 | 35 | 589 | 1 | 19 | 20 | 187 |
| 186 | HWBCP79 | 209641 Feb. 25, 1998 | pCMVSport 3.0 | 196 | 1138 | 1 | 1138 | 243 | 243 | 490 | 1 | 21 | 22 | 105 |
| 186 | HWBCP79 | 209641 Feb. 25, 1998 | pCMVSport 3.0 | 296 | 1138 | 1 | 1138 | 233 | 233 | 590 | 1 | 21 | 22 | 105 |
| 187 | HWHGP71 | 203858 Mar. 18, 1999 | pCMVSport 3.0 | 197 | 1021 | 1 | 1021 | 389 | 389 | 491 | 1 | 51 | 52 | 211 |
| 187 | HWHGP71 | 203858 Mar. 18, 1999 | pCMVSport 3.0 | 297 | 1037 | 1 | 1037 | 394 | 394 | 591 | 1 | 18 | 19 | 77 |
| 188 | HWHQS55 | 203027 Jun. 26, 1998 | pCMVSport 3.0 | 198 | 3282 | 1 | 3282 | 169 | 169 | 492 | 1 | 26 | 27 | 742 |
| 189 | HWLEV32 | PTA-884 Oct. 28, 1999 | pSport1 | 199 | 1218 | 1 | 1218 | 39 | 39 | 493 | 1 | 18 | 19 | 45 |
| 189 | HWLEV32 | PTA-884 Oct. 28, 1999 | pSport1 | 298 | 1203 | 1 | 1203 | 29 | 29 | 592 | 1 | 18 | 19 | 45 |
| 189 | HWLEV32 | PTA-884 Oct. 28, 1999 | pSport1 | 299 | 1144 | 528 | 596 | | 3 | 593 | 1 | 1 | 2 | 136 |
| 189 | HWLEV32 | PTA-884 Oct. 28, 1999 | pSport1 | 300 | 1120 | 791 | 851 | | 1 | 594 | 1 | 1 | 2 | 141 |
| 190 | HYBAR01 | 209580 Jan. 14, 1998 | Uni-ZAP XR | 200 | 1440 | 1 | 1440 | 157 | 157 | 494 | 1 | 26 | 27 | 46 |
| 191 | HYBBE75 | 203570 Jan. 11, 1999 | Uni-ZAP XR | 201 | 838 | 1 | 838 | 319 | 319 | 495 | 1 | 25 | 26 | 41 |
| 192 | HAPSA79 | PTA-1543 Mar. 21, 2000 | Uni-ZAP XR | 202 | 4386 | 1 | 4386 | 468 | 468 | 496 | 1 | 30 | 31 | 310 |
| 192 | HAPSA79 | PTA-1543 Mar. 21, 2000 | Uni-ZAP XR | 301 | 4385 | 1 | 4385 | 468 | 468 | 595 | 1 | 30 | 31 | 310 |
| 192 | HAPSA79 | PTA-1543 Mar. 21, 2000 | Uni-ZAP XR | 302 | 4386 | 1 | 4386 | 468 | 468 | 596 | 1 | 30 | 31 | 310 |
| 193 | HDPJM30 | 209563 Dec. 18, 1997 | pCMVSport 3.0 | 203 | 1635 | 308 | 1633 | 59 | 59 | 497 | 1 | 59 | 60 | 525 |
| 194 | HHFGR93 | 209746 Apr. 07, 1998 | Uni-ZAP XR | 204 | 1835 | 1 | 1835 | 132 | 132 | 498 | 1 | 29 | 30 | 390 |
| 195 | HJBAV55 | 203364 Oct. 19, 1998 | pBLUESCRIPT ™ | 205 | 2441 | 39 | 2429 | 238 | 238 | 499 | 1 | 26 | 27 | 58 |
| | | | SK− | | | | | | | | | | | |

Table 1B (Comprised of Tables 1B.1 and 1B.2)

[0085] The first column in Table 1B.1 and Table 1B.2 provides the gene number in the application corresponding to the clone identifier. The second column in Table 1B.1 and Table 1B.2 provides a unique “Clone ID:” for the cDNA clone related to each contig sequence disclosed in Table 1B.1 and Table 1B.2. This clone ID references the cDNA clone which contains at least the 5′ most sequence of the assembled contig and at least a portion of SEQ ID NO:X as determined by directly sequencing the referenced clone. The referenced clone may have more sequence than described in the sequence listing or the clone may have less. In the vast majority of cases, however, the clone is believed to encode a full-length polypeptide. In the case where a clone is not full-length, a full-length cDNA can be obtained by methods described elsewhere herein. The third column in Table 1B.1 and Table 1B.2 provides a unique “Contig ID” identification for each contig sequence. The fourth column in Table 1B.1 and Table 1B.2 provides the “SEQ ID NO:” identifier for each of the contig polynucleotide sequences disclosed in Table 1B.

Table 1B.1

[0086] The fifth column in Table 1B.1, “ORF (From-To)”, provides the location (i.e., nucleotide position numbers) within the polynucleotide sequence “SEQ ID NO:X” that delineate the preferred open reading frame (ORF) shown in the sequence listing and referenced in Table 1B.1, column 6, as SEQ ID NO:Y. Where the nucleotide position number “To” is lower than the nucleotide position number “From”, the preferred ORF is the reverse complement of the referenced polynucleotide sequence. The sixth column in Table 1B.1 provides the corresponding SEQ ID NO:Y for the polypeptide sequence encoded by the preferred ORF delineated in column 5. In one embodiment, the invention provides an amino acid sequence comprising, or alternatively consisting of, a polypeptide encoded by the portion of SEQ ID NO:X delineated by “ORF (From-To)”. Also provided are polynucleotides encoding such amino acid sequences and the complementary strand thereto. Column 7 in Table 1B.1 lists residues comprising epitopes contained in the polypeptides encoded by the preferred ORF (SEQ ID NO:Y), as predicted using the algorithm of Jameson and Wolf, (1988) Comp. Appl. Biosci. 4:181-186. The Jameson-Wolf antigenic analysis was performed using the computer program PROTEAN (Version 3.11 for the Power Macintosh, DNASTAR, Inc., 1228 South Park Street Madison, Wis.). In specific embodiments, polypeptides of the invention comprise, or alternatively consist of, at least one, two, three, four, five or more of the predicted epitopes as described in Table 1B. It will be appreciated that depending on the analytical criteria used to predict antigenic determinants, the exact address of the determinant may vary slightly.

[0087] Column 8 in Table 1B.1 provides a chromosomal map location for certain polynucleotides of the invention. Chromosomal location was determined by finding exact matches to EST and cDNA sequences contained in the NCBI (National Center for Biotechnology Information) UniGene database. Each sequence in the UniGene database is assigned to a “cluster”; all of the ESTs, cDNAs, and STSs in a cluster are believed to be derived from a single gene. Chromosomal mapping data is often available for one or more sequence(s) in a UniGene cluster; this data (if consistent) is then applied to the cluster as a whole. Thus, it is possible to infer the chromosomal location of a new polynucleotide sequence by determining its identity with a mapped UniGene cluster.

[0088] A modified version of the computer program BLASTN (Altshul, et al., J. Mol. Biol. 215:403-410 (1990), and Gish, and States, Nat. Genet. 3:266-272) (1993) was used to search the UniGene database for EST or cDNA sequences that contain exact or near-exact matches to a polynucleotide sequence of the invention (the ‘Query’). A sequence from the UniGene database (the ‘Subject’) was said to be an exact match if it contained a segment of 50 nucleotides in length such that 48 of those nucleotides were in the same order as found in the Query sequence. If all of the matches that met this criteria were in the same UniGene cluster, and mapping data was available for this cluster, it is indicated in Table 1B under the heading “Cytologic Band”. Where a cluster had been further localized to a distinct cytologic band, that band is disclosed; where no banding information was available, but the gene had been localized to a single chromosome, the chromosome is disclosed.

[0089] Once a presumptive chromosomal location was determined for a polynucleotide of the invention, an associated disease locus was identified by comparison with a database of diseases which have been experimentally associated with genetic loci. The database used was the Morbid Map, derived from OMIM™ and National Center for Biotechnology Information, National Library of Medicine (Bethesda, Md.) 2000. If the putative chromosomal location of a polynucleotide of the invention (Query sequence) was associated with a disease in the Morbid Map database, an OMIM reference identification number was noted in column 9, Table 1B.1, labelled “OMIM Disease Reference(s). Table 5 is a key to the OMIM reference identification numbers (column 1), and provides a description of the associated disease in Column 2.

Table 1B.2

[0090] Column 5, in Table 1B.2, provides an expression profile and library code:count for each of the contig sequences (SEQ ID NO:X) disclosed in Table 1B, which can routinely be combined with the information provided in Table 4 and used to determine the tissues, cells, and/or cell line libraries which predominantly express the polynucleotides of the invention. The first number in Table 1B.2, column 5 (preceding the colon), represents the tissue/cell source identifier code corresponding to the code and description provided in Table 4. The second number in column 5 (following the colon) represents the number of times a sequence corresponding to the reference polynucleotide sequence was identified in the corresponding tissue/cell source. Those tissue/cell source identifier codes in which the first two letters are “AR” designate information generated using DNA array technology. Utilizing this technology, cDNAs were amplified by PCR and then transferred, in duplicate, onto the array. Gene expression was assayed through hybridization of first strand cDNA probes to the DNA array. cDNA probes were generated from total RNA extracted from a variety of different tissues and cell lines. Probe synthesis was performed in the presence of ³³P dCTP, using oligo (dT) to prime reverse transcription. After hybridization, high stringency washing conditions were employed to remove non-specific hybrids from the array. The remaining signal, emanating from each gene target, was measured using a Phosphorimager. Gene expression was reported as Phosphor Stimulating Luminescence (PSL) which reflects the level of phosphor signal generated from the probe hybridized to each of the gene targets represented on the array. A local background signal subtraction was performed before the total signal generated from each array was used to normalize gene expression between the different hybridizations. The value presented after “[array code]:” represents the mean of the duplicate values, following background subtraction and probe normalization. One of skill in the art could routinely use this information to identify normal and/or diseased tissue(s) which show a predominant expression pattern of the corresponding polynucleotide of the invention or to identify polynucleotides which show predominant and/or specific tissue and/or cell expression.

TABLE 1B.1

| | | | | | AA | | | |
|---|---|---|---|---|---|---|---|---|
| | | | | | SEQ | | | OMIM |
| Gene | cDNA | | SEQ ID | ORF | ID | | Cytologic | Disease |
| No: | Clone ID | Contig ID: | NO: X | (From-To) | NO: Y | Predicted Epitopes | Band | Reference(s): |
| 1 | H2MAC30 | 544957 | 11 | 157-375 | 300 | Pro-54 to Gly-67. | | |
| 2 | H6EDF66 | 520498 | 12 | 146-538 | 301 | | | |
| 3 | H6EDX46 | 1352262 | 13 | 229-774 | 302 | Arg-21 to Leu-26, | 12q15 | 181430, 600698, 600698, 600698, |
| | | | | | | Arg-88 to Asn-104, | | 600698, 600808, 602116 |
| | | | | | | Arg-111 to Ser-116, | | |
| | | | | | | Arg-154 to Lys-160, | | |
| | | | | | | Cys-164 to Asp-169. | | |
| | H6EDX46 | 637786 | 203 | 128-382 | 492 | Arg-21 to Leu-26. | | |
| 4 | HABAG37 | 637942 | 14 | 97-285 | 303 | Thr-24 to Gly-42, | 19p13.3 | 108725, 120700, 133171, 136836, |
| | | | | | | Glu-53 to Gly-58. | | 145981, 147141, 164953, 188070, |
| | | | | | | | | 600957, 601238, 601846, 602216, |
| | | | | | | | | 602477 |
| 5 | HACBD91 | 637482 | 15 | 117-266 | 304 | | 3q13.33 | 600882 |
| 6 | HACC117 | 891114 | 16 | 461-1114 | 305 | Ser-201 to Tyr-217. | 22q11.21 | 123620, 151410, 600850 |
| | HACC117 | 731877 | 204 | 135-353 | 493 | | | |
| 7 | HAGAM64 | 626997 | 17 | 57-191 | 306 | Arg-30 to Tyr-39. | | |
| 8 | HAHDR32 | 635357 | 18 | 435-980 | 307 | Met-1 to Ser-7, | 3p14.3-p14.1 | 150250, 156845, 156845, 156845, |
| | | | | | | Asp-41 to Met-48, | | 164500, 277730, 600971, 601226 |
| | | | | | | Pro-61 to Ser-67, | | |
| | | | | | | Pro-121 to Trp-130, | | |
| | | | | | | His-161 to Lys-181. | | |
| 9 | HAIBO71 | 490848 | 19 | 325-525 | 308 | | | |
| 10 | HAJAF57 | 823516 | 20 | 43-324 | 309 | Cys-25 to Ile-31, | | |
| | | | | | | Cys-85 to Asn-91. | | |
| 11 | HAMFC93 | 904749 | 21 | 136-711 | 310 | Asp-31 to Pro-36, | 6q27 | 152200, 167000, 600320, 600883, 602544 |
| | | | | | | Ser-88 to Gln-95, | | |
| | | | | | | Ala-163 to Glu-171. | | |
| | HAMFC93 | 900586 | 205 | 115-651 | 494 | Asp-31 to Pro-36, | | |
| | | | | | | Ser-88 to Gln-95. | | |
| | HAMFC93 | 906819 | 206 | 323-349 | 495 | | | |
| 12 | HAPNY86 | 587261 | 22 | 100-489 | 311 | Pro-27 to Leu-41. | | |
| 13 | HATDF29 | 845965 | 23 | 143-1300 | 312 | Ser-35 to Ser-44, | | |
| | | | | | | Ser-86 to Leu-91, | | |
| | | | | | | Asp-143 to Leu-150, | | |
| | | | | | | Lys-166 to Ser-171, | | |
| | | | | | | Ser-208 to Gly-213, | | |
| | | | | | | Lys-239 to Leu-244, | | |
| | | | | | | Glu-317 to Asn-324. | | |
| 14 | HBAFJ33 | 625916 | 24 | 60-392 | 313 | Gln-66 to Cys-71, | 14q32 | 123270, 245200, 251600, 270100, 276900 |
| | | | | | | Thr-76 to Gly-81, | | |
| | | | | | | His-87 to Asp-92. | | |
| 15 | HBAFV19 | 843036 | 25 | 6-779 | 314 | Pro-12 to Phe-18, | | |
| | | | | | | Ser-139 to Pro-146, | | |
| | | | | | | Asp-162 to Arg-173, | | |
| | | | | | | Thr-188 to Glu-204, | | |
| | | | | | | Lys-245 to Gly-258. | | |
| 16 | HBIBW67 | 553678 | 26 | 685-798 | 315 | Met-1 to Tyr-8. | | |
| 17 | HBIMB51 | 963208 | 27 | 98-535 | 316 | His-24 to Ala-29, | | |
| | | | | | | Glu-42 to Glu-49, | | |
| | | | | | | Arg-63 to Thr-80, | | |
| | | | | | | Gln-100 to Lys-119, | | |
| | | | | | | Lys-141 to Gln-146. | | |
| | HBIMB51 | 672711 | 207 | 93-485 | 496 | His-24 to Ala-29, | | |
| | | | | | | Glu-42 to Glu-49. | | |
| 18 | HBJID05 | 1130660 | 28 | 157-756 | 317 | Lys-82 to Pro-87, | | |
| | | | | | | Leu-110 to Lys-129. | | |
| | HBJID05 | 544980 | 208 | 137-472 | 497 | Lys-82 to Pro-90. | | |
| 19 | HBJJU28 | 561723 | 29 | 133-387 | 318 | Gln-23 to Asn-31, | | |
| | | | | | | Tyr-42 to Ser-58. | | |
| 20 | HBJLH40 | 828130 | 30 | 74-298 | 319 | Ile-69 to Pro-74. | | |
| 21 | HBXFL29 | 842802 | 31 | 560-733 | 320 | Arg-36 to Pro-43. | 17q22-q23 | 106180, 109270, 109270, 109270, |
| | | | | | | | | 109270, 109270, 120150, 120150, |
| | | | | | | | | 120150, 138700, 139250, 148065, |
| | | | | | | | | 148080, 150200, 154275, 171190, |
| | | | | | | | | 176960, 185800, 221820, 249000, |
| | | | | | | | | 253250, 600525, 600852, 601844 |
| 22 | HCACU58 | 625923 | 32 | 137-388 | 321 | | | |
| 23 | HCDBW86 | 520435 | 33 | 139-231 | 322 | | | |
| 24 | HCE3G69 | 728432 | 34 | 165-1175 | 323 | Lys-50 to Asp-66, | 2q36.1 | 120070, 120131, 120131, 138030, 259900 |
| | | | | | | Pro-68 to Glu-77, | | |
| | | | | | | Glu-102 to Glu-107, | | |
| | | | | | | Glu-131 to Leu-146, | | |
| | | | | | | Ala-175 to Glu-183, | | |
| | | | | | | Phe-205 to Lys-216, | | |
| | | | | | | Val-263 to Thr-281, | | |
| | | | | | | Pro-304 to Ala-313. | | |
| | HCE3G69 | 494346 | 209 | 165-482 | 498 | Lys-50 to Leu-69. | | |
| 25 | HCEEA88 | 634967 | 35 | 134-316 | 324 | Asn-28 to Pro-34. | 21q22.2 | 176261, 601399 |
| 26 | HCEFB69 | 748245 | 36 | 188-862 | 325 | Gln-189 to Gly-195. | | |
| 27 | HCFMV71 | 526599 | 37 | 31-207 | 326 | Arg-35 to Gly-44. | | |
| 28 | HCNSD93 | 630649 | 38 | 139-279 | 327 | | | |
| 29 | HCUIM65 | 550208 | 39 | 557-700 | 328 | | | |
| 30 | HCWKC15 | 553621 | 40 | 37-159 | 329 | Lys-28 to Thr-34. | | |
| 31 | HCWLD74 | 628256 | 41 | 138-335 | 330 | | | |
| 32 | HDHEB60 | 499233 | 42 | 568-894 | 331 | Asp-48 to Ser-54. | 11p11.2 | 133701, 168500, 171650, 176930, |
| | | | | | | | | 176930, 600623, 600811, 600958 |
| 33 | HDHMA45 | 902513 | 43 | 199-1440 | 332 | Ala-145 to Ser-154, | 11q | |
| | | | | | | Ala-258 to Tyr-263, | | |
| | | | | | | Ala-287 to Arg-297, | | |
| | | | | | | Thr-306 to Met-316. | | |
| | HDHMA45 | 812764 | 210 | 204-1445 | 499 | Ala-145 to Ser-154, | | |
| | | | | | | Ala-258 to Tyr-263, | | |
| | | | | | | Ala-287 to Arg-297, | | |
| | | | | | | Thr-306 to Met-316. | | |
| 34 | HDHMA72 | 547772 | 44 | 287-1234 | 333 | Glu-67 to Asn-74, | 7q36 | 142335, 152427, 163729, 176450, |
| | | | | | | Glu-88 to Asn-93, | | 190605, 600510, 600725 |
| | | | | | | Lys-95 to Ser-105, | | |
| | | | | | | Arg-152 to Ala-164, | | |
| | | | | | | Ala-204 to Arg-210, | | |
| | | | | | | Phe-254 to Thr-262, | | |
| | | | | | | Pro-295 to His-311. | | |
| 35 | HDPBA28 | 1062783 | 45 | 259-3084 | 334 | Gln-33 to Trp-49, | 5q14.3 | |
| | | | | | | Gly-161 to Gly-172, | | |
| | | | | | | Ile-207 to Arg-212, | | |
| | | | | | | Asn-414 to Val-419, | | |
| | | | | | | Val-423 to Gln-428, | | |
| | | | | | | Val-436 to Gly-441, | | |
| | | | | | | Lys-467 to Leu-478, | | |
| | | | | | | Phe-497 to Ser-508, | | |
| | | | | | | Met-550 to Gly-560, | | |
| | | | | | | Glu-688 to Thr-697, | | |
| | | | | | | Ile-711 to Gly-720, | | |
| | | | | | | Ala-747 to Gly-759, | | |
| | | | | | | Leu-785 to Phe-791, | | |
| | | | | | | Ser-795 to Gln-800, | | |
| | | | | | | Thr-808 to Lys-813, | | |
| | | | | | | Ser-821 to Phe-832, | | |
| | | | | | | Thr-879 to Glu-889, | | |
| | | | | | | Leu-898 to Gln-904, | | |
| | | | | | | Gln-934 to Met-941. | | |
| | HDPBA28 | 866429 | 211 | 69-2894 | 500 | Gln-33 to Trp-49, | | |
| | | | | | | Gly-161 to Gly-172, | | |
| | | | | | | Ile-207 to Arg-212, | | |
| | | | | | | Asn-414 to Val-419, | | |
| | | | | | | Val-423 to Gln-428, | | |
| | | | | | | Val-436 to Gly-441, | | |
| | | | | | | Lys-467 to Leu-478, | | |
| | | | | | | Phe-497 to Ser-508, | | |
| | | | | | | Met-550 to Gly-560, | | |
| | | | | | | Glu-688 to Thr-697, | | |
| | | | | | | Ile-711 to Gly-720, | | |
| | | | | | | Ala-747 to Gly-759, | | |
| | | | | | | Leu-785 to Phe-791, | | |
| | | | | | | Ser-795 to Gln-800. | | |
| 36 | HDPCO25 | 460682 | 46 | 182-343 | 335 | Pro-22 to His-33, | | |
| | | | | | | Ser-42 to Trp-48. | | |
| 37 | HDPCY37 | 837699 | 47 | 76-1809 | 336 | Pro-23 to His-34, | 12q13.3 | 181430, 232800, 600808, 601284, |
| | | | | | | Thr-64 to Trp-71. | | 601769, 601769, 602116 |
| | HDPCY37 | 604114 | 212 | 76-870 | 501 | Pro-23 to His-34, | | |
| | | | | | | Thr-64 to Trp-71, | | |
| | | | | | | Lys-245 to Ala-252. | | |
| 38 | HDPHI51 | 460679 | 48 | 245-367 | 337 | Gly-2 to Glu-7, | | |
| | | | | | | Arg-27 to Gly-34. | | |
| 39 | HDPND46 | 637586 | 49 | 15-1469 | 338 | Ala-107 to Ser-112. | | |
| 40 | HDPOH06 | 683371 | 50 | 252-980 | 339 | Met-1 to Ser-8. | | |
| 41 | HDPSP54 | 744440 | 51 | 2356-2499 | 340 | Pro-29 to Lys-37. | 1q21.2 | 104770, 107670, 110700, 145001, |
| | | | | | | | | 146760, 146790, 191315, 601412, |
| | | | | | | | | 601652, 601863, 602491 |
| | HDPSP54 | 502472 | 213 | 179-343 | 502 | | | |
| 42 | HDPVH60 | 796865 | 52 | 8-163 | 341 | | 16q13 | 114835, 132700, 172490, 600968 |
| 43 | HDPWN93 | 992925 | 53 | 45-2453 | 342 | Pro-36 to Ser-52, | 17q21.33 | 109270, 109270, 109270, 109270, |
| | | | | | | Ala-63 to Pro-78, | | 109270, 120150, 120150, 120150, |
| | | | | | | Ala-106 to Lys-115, | | 148065, 148080, 154275, 171190, |
| | | | | | | Glu-134 to Glu-141, | | 185800, 221820, 249000, 253250, |
| | | | | | | Val-155 to Asp-164, | | 600119, 600119, 600525, 601844 |
| | | | | | | Phe-199 to Gly-204, | | |
| | | | | | | Arg-218 to Leu-228, | | |
| | | | | | | Glu-230 to Val-235, | | |
| | | | | | | Val-247 to Pro-253, | | |
| | | | | | | Arg-262 to Gly-276, | | |
| | | | | | | Thr-303 to Gln-310, | | |
| | | | | | | Arg-335 to Trp-342, | | |
| | | | | | | Glu-399 to Ala-415, | | |
| | | | | | | Ser-458 to Glu-466, | | |
| | | | | | | Arg-508 to Asp-517, | | |
| | | | | | | Glu-580 to Pro-585, | | |
| | | | | | | Gln-620 to Trp-628, | | |
| | | | | | | Lys-651 to Ala-657, | | |
| | | | | | | Gly-677 to Met-682, | | |
| | | | | | | Ala-712 to Leu-717, | | |
| | | | | | | Gly-724 to Thr-731, | | |
| | | | | | | Arg-770 to Gln-775. | | |
| | HDPWN93 | 887914 | 214 | 35-679 | 503 | Pro-36 to Ser-52, | | |
| | | | | | | Ala-63 to Pro-78, | | |
| | | | | | | Ala-106 to Lys-115, | | |
| | | | | | | Glu-134 to Glu-141, | | |
| | | | | | | Val-155 to Asp-164. | | |
| | HDPWN93 | 905983 | 215 | 27-158 | 504 | | | |
| 44 | HDQHD03 | 1309175 | 54 | 274-1266 | 343 | Arg-26 to Lys-46, | | |
| | | | | | | Ala-70 to Lys-81, | | |
| | | | | | | Gln-100 to Pro-105, | | |
| | | | | | | Val-118 to Leu-123, | | |
| | | | | | | Pro-166 to Pro-171, | | |
| | | | | | | Gly-310 to Gly-331. | | |
| | HDQHD03 | 834692 | 216 | 259-1257 | 505 | Arg-26 to Lys-46, | | |
| | | | | | | Ala-70 to Lys-81, | | |
| | | | | | | Phe-92 to Gly-98. | | |
| 45 | HE2EN04 | 545008 | 55 | 57-209 | 344 | | | |
| 46 | HE8QV67 | 1050076 | 56 | 502-744 | 345 | | 9 | |
| | HE8QV67 | 1050077 | 217 | 256-1500 | 506 | Gln-29 to Lys-35, | | |
| | | | | | | Lys-48 to Gln-54, | | |
| | | | | | | Arg-80 to Asp-90, | | |
| | | | | | | Pro-166 to Arg-173, | | |
| | | | | | | Glu-178 to Tyr-188, | | |
| | | | | | | Glu-220 to Leu-228, | | |
| | | | | | | Ile-246 to Pro-253, | | |
| | | | | | | Arg-281 to Asp-288, | | |
| | | | | | | Ser-305 to His-313, | | |
| | | | | | | Asn-319 to Asp-328, | | |
| | | | | | | Asp-361 to Phe-366, | | |
| | | | | | | Arg-372 to Tyr-377, | | |
| | | | | | | Gly-384 to Ser-402. | | |
| 47 | HE8UB86 | 834913 | 57 | 201-953 | 346 | Pro-43 to Cys-52, | | |
| | | | | | | Lys-105 to Ser-113. | | |
| 48 | HE9BK23 | 675382 | 58 | 39-968 | 347 | Arg-18 to Asp-27, | 1p31.1-p22.3 | 600309, 601414, 602094 |
| | | | | | | Leu-29 to Arg-36, | | |
| | | | | | | Ser-90 to Tyr-104, | | |
| | | | | | | Val-108 to Lys-114. | | |
| 49 | HEBBN36 | 486120 | 59 | 645-806 | 348 | | 17q21.31 | 109270, 109270, 109270, 109270, |
| | | | | | | | | 109270, 120150, 120150, 120150, |
| | | | | | | | | 148065, 148080, 154275, 171190, |
| | | | | | | | | 185800, 221820, 249000, 253250, |
| | | | | | | | | 600119, 600119, 600525, 601844 |
| 50 | HEQCC55 | 1352368 | 60 | 25-411 | 349 | Pro-35 to Trp-42, | 16p13.3 | 141750, 141800, 141800, 141800, |
| | | | | | | Ala-53 to Asp-62, | | 141800, 141850, 141850, 141850, |
| | | | | | | Arg-103 to Phe-110, | | 141850, 141850, 156850, 186580, |
| | | | | | | Ile-114 to Glu-120. | | 191092, 600140, 600273, 601313, |
| | | | | | | | | 601785 |
| | HEQCC55 | 884824 | 218 | 62-397 | 507 | Pro-35 to Trp-42, | | |
| | | | | | | Pro-65 to Asp-72, | | |
| | | | | | | Thr-86 to Phe-93, | | |
| | | | | | | Ile-97 to Glu-103. | | |
| | HEQCC55 | 748227 | 219 | 57-524 | 508 | Pro-35 to Trp-42, | | |
| | | | | | | Pro-65 to Asp-72, | | |
| | | | | | | Thr-86 to Glu-92, | | |
| | | | | | | Pro-96 to Gly-104, | | |
| | | | | | | Ser-138 to Gly-154. | | |
| 51 | HESAJ10 | 526013 | 61 | 405-620 | 350 | | | |
| 52 | HETEU28 | 1018676 | 62 | 256-717 | 351 | Glu-80 to Trp-85, | | |
| | | | | | | Gly-91 to Asp-99, | | |
| | | | | | | Leu-106 to Leu-116, | | |
| | | | | | | Trp-120 to Pro-146. | | |
| | HETEU28 | 882328 | 220 | 331-792 | 509 | Glu-80 to Trp-85, | | |
| | | | | | | Gly-91 to Pro-97. | | |
| 53 | HFABG18 | 847073 | 63 | 53-316 | 352 | Glu-36 to Lys-55. | 19q13 | 109560, 205900, 600652, 600757 |
| 54 | HFAMB72 | 490697 | 64 | 559-741 | 353 | Gln-53 to Thr-60. | | |
| 55 | HFCCQ50 | 579993 | 65 | 47-1105 | 354 | Ala-27 to Ser-38, | 12q24 | 113100, 124200, 147440, 158590, |
| | | | | | | Pro-43 to Asn-54, | | 160781, 163950, 163950, 251170, |
| | | | | | | Thr-115 to Asp-121, | | 276710, 600175, 601517 |
| | | | | | | Leu-225 to Val-232, | | |
| | | | | | | Pro-247 to Gly-252, | | |
| | | | | | | Arg-306 to Leu-311. | | |
| 56 | HFIIZ70 | 1043350 | 66 | 24-167 | 355 | | 22 | |
| | HFIIZ70 | 906708 | 221 | 74-217 | 510 | | | |
| 57 | HFKET18 | 889515 | 67 | 137-361 | 356 | Lys-60 to Ser-74. | | |
| 58 | HFLNB64 | 580829 | 68 | 62-199 | 357 | | 8p23-p22 | 148370, 238600, 238600, 238600, |
| | | | | | | | | 238600, 600143, 601385, 602629 |
| 59 | HFOXA73 | 850699 | 69 | 25-180 | 358 | | 12, 12p13 | |
| | HFOXA73 | 532079 | 222 | 15-68 | 511 | | | |
| 60 | HFPAC12 | 589522 | 70 | 140-406 | 359 | Thr-26 to Glu-33. | 5q33.2 | 109690, 109690, 164770, 180071 |
| 61 | HFPAO71 | 629193 | 71 | 414-809 | 360 | Pro-43 to Pro-50, | | |
| | | | | | | Asn-65 to Gly-70. | | |
| 62 | HFPCX36 | 526635 | 72 | 103-243 | 361 | | | |
| 63 | HFPCX64 | 1309796 | 73 | 181-444 | 362 | Lys-60 to Asn-67. | | |
| | HFPCX64 | 877637 | 223 | 181-723 | 512 | Lys-60 to Asn-67. | | |
| | HFPCX64 | 638851 | 224 | 257-520 | 513 | Lys-60 to Asn-67. | | |
| | HFPCX64 | 514187 | 225 | 257-517 | 514 | | | |
| 64 | HFTBM50 | 545012 | 74 | 158-262 | 363 | Ala-19 to Lys-34. | 4q12 | 103600, 103600, 103600, 104150, |
| | | | | | | | | 104150, 104500, 164920, 164920, |
| | | | | | | | | 164920, 170650, 600900 |
| 65 | HFXDJ75 | 626114 | 75 | 44-169 | 364 | Pro-31 to Pro-37. | | |
| 66 | HFXJU68 | 1352218 | 76 | 141-626 | 365 | | 1p33 | 120260, 138140, 178300, 246450 |
| | HFXJU68 | 570855 | 226 | 148-348 | 515 | | | |
| 67 | HGBIB74 | 837220 | 77 | 14-1144 | 366 | Ser-67 to Glu-74, | 20q11.21 | |
| | | | | | | Arg-81 to Val-86, | | |
| | | | | | | Tyr-147 to Asp-160. | | |
| | HGBIB74 | 838602 | 227 | 28-540 | 516 | Ser-67 to Glu-74, | | |
| | | | | | | Arg-81 to Val-86, | | |
| | | | | | | Tyr-147 to Asp-160. | | |
| | HGBIB74 | 899864 | 228 | 2-454 | 517 | Ser-3 to Gln-10, | | |
| | | | | | | Val-14 to Gln-19, | | |
| | | | | | | Asp-32 to His-40, | | |
| | | | | | | Gly-50 to His-55, | | |
| | | | | | | Pro-76 to Ser-87. | | |
| 68 | HHEMA75 | 494099 | 78 | 569-823 | 367 | Lys-74 to Tyr-79. | 7q33 | 180105, 222800 |
| 69 | HHENK42 | 493724 | 79 | 63-191 | 368 | | 7 | |
| 70 | HHEPM33 | 877639 | 80 | 269-517 | 369 | Met-1 to Thr-13, | 2q36.1 | 120070, 120131, 120131, 138030, 259900 |
| | | | | | | Ser-27 to Phe-34, | | |
| | | | | | | Arg-53 to Pro-59, | | |
| | | | | | | Ser-77 to Ser-82. | | |
| 71 | HHEPT60 | 463027 | 81 | 245-355 | 370 | | 19p13.3 | 108725, 120700, 133171, 136836, |
| | | | | | | | | 145981, 147141, 164953, 188070, |
| | | | | | | | | 600957, 601238, 601846, 602216, |
| | | | | | | | | 602477 |
| 72 | HHFHJ59 | 411332 | 82 | 192-530 | 371 | Pro-32 to Ser-39. | | |
| 73 | HHGDW43 | 554613 | 83 | 107-241 | 372 | Ser-39 to Ser-44. | | |
| 74 | HHPEC09 | 695726 | 84 | 71-238 | 373 | Tyr-39 to Arg-51. | | |
| 75 | HHPTJ65 | 490904 | 85 | 247-393 | 374 | | | |
| 76 | HJABX32 | 487807 | 86 | 557-712 | 375 | Trp-29 to Gly-42, | | |
| | | | | | | Gly-46 to His-51. | | |
| 77 | HJBCU04 | 877643 | 87 | 96-626 | 376 | Met-1 to Cys-7, | 9p13-p12 | 230400, 250250 |
| | | | | | | Gln-45 to Gly-61, | | |
| | | | | | | Gln-77 to Thr-93, | | |
| | | | | | | Arg-113 to Arg-118, | | |
| | | | | | | Ser-135 to Glu-147, | | |
| | | | | | | Gln-155 to Ala-161. | | |
| 78 | HJMBN89 | 565675 | 88 | 348-518 | 377 | | 14q32.33 | 144120, 147020, 147110 |
| 79 | HJMBW30 | 491209 | 89 | 110-238 | 378 | Pro-30 to Ala-35. | | |
| 80 | HKABI84 | 565078 | 90 | 274-417 | 379 | Phe-25 to Ser-30. | 1p32-p34 | 120950, 120960, 130500, 133200, |
| | | | | | | | | 138140, 168360, 171760 171760, |
| | | | | | | | | 176100, 176100, 178300, 187040, |
| | | | | | | | | 230000, 255800, 600101, 600650, |
| | | | | | | | | 600650, 600722, 600722 |
| 81 | HKACB56 | 554616 | 91 | 27-269 | 380 | Tyr-39 to Lys-58. | | |
| 82 | HKACM93 | 1352383 | 92 | 218-2293 | 381 | Ser-5 to Trp-10, | 1 | |
| | | | | | | Ala-30 to Glu-39, | | |
| | | | | | | Arg-66 to Trp-72, | | |
| | | | | | | Glu-84 to Arg-97, | | |
| | | | | | | Glu-159 to Gly-176, | | |
| | | | | | | Ile-189 to Glu-197, | | |
| | | | | | | Glu-206 to Arg-215, | | |
| | | | | | | Arg-218 to Gly-227, | | |
| | | | | | | Gly-316 to Ala-322, | | |
| | | | | | | Pro-430 to Val-435, | | |
| | | | | | | Pro-446 to Gly-452, | | |
| | | | | | | Ser-488 to Gly-504, | | |
| | | | | | | Glu-569 to Lys-575, | | |
| | | | | | | Pro-581 to Cys-588, | | |
| | | | | | | Ala-687 to Gln-692. | | |
| | HKACM93 | 907084 | 229 | 189-548 | 518 | Ser-5 to Trp-10, | | |
| | | | | | | Ala-30 to Glu-39, | | |
| | | | | | | Arg-66 to Trp-72, | | |
| | | | | | | Glu-84 to Arg-97. | | |
| | HKACM93 | 907085 | 230 | 314-1120 | 519 | Ser-5 to Trp-10, | | |
| | | | | | | Ala-30 to Glu-39, | | |
| | | | | | | Arg-66 to Trp-72, | | |
| | | | | | | Glu-84 to Arg-97, | | |
| | | | | | | Glu-159 to Gly-176, | | |
| | | | | | | Ile-189 to Glu-197, | | |
| | | | | | | Glu-206 to Arg-215, | | |
| | | | | | | Arg-218 to His-226. | | |
| | HKACM93 | 906154 | 231 | 202-255 | 520 | Trp-2 to Met-16. | | |
| | HKACM93 | 906150 | 232 | 638-775 | 521 | Gln-24 to Gly-31, | | |
| | | | | | | Pro-33 to Ala-38. | | |
| 83 | HKADQ91 | 604123 | 93 | 229-1056 | 382 | Cys-31 to Arg-36, | | |
| | | | | | | Asp-81 to His-86, | | |
| | | | | | | Asn-264 to Met-275. | | |
| 84 | HKAEG43 | 889521 | 94 | 32-241 | 383 | Pro-41 to Cys-47, | | |
| | | | | | | Phe-52 to Gly-59, | | |
| | | | | | | Pro-62 to His-70. | | |
| | HKAEG43 | 753273 | 233 | 21-233 | 522 | Pro-41 to Cys-47, | | |
| | | | | | | Phe-52 to Gly-59, | | |
| | | | | | | Pro-62 to His-70. | | |
| 85 | HKDBF34 | 833065 | 95 | 69-734 | 384 | Lys-60 to Ala-66, | Xp22 | 300000, 300066, 300077, 300310, |
| | | | | | | Arg-169 to Cys-186, | | 301220, 302350, 304050, 304110, |
| | | | | | | Asp-199 to Gly-205, | | 306100, 309530, 309585, 312040 |
| | | | | | | Thr-214 to Leu-219. | | |
| | HKDBF34 | 587268 | 234 | 18-332 | 523 | Lys-60 to Ala-66, | | |
| | | | | | | Thr-78 to Ser-83. | | |
| 86 | HKISB57 | 625956 | 96 | 130-417 | 385 | Ala-23 to Arg-36, | 22q12.2 | 101000, 101000, 101000, 101000, |
| | | | | | | His-38 to Ala-46, | | 123620, 138981, 188826, 600850, |
| | | | | | | Pro-50 to Gly-56, | | 601669 |
| | | | | | | Arg-85 to Val-94. | | |
| 87 | HKIYP40 | 580845 | 97 | 43-273 | 386 | Ala-66 to Leu-73. | | |
| 88 | HKMLK53 | 587269 | 98 | 20-229 | 387 | Gly-27 to Cys-35. | 2q35 | 118800, 123660, 125660, 125660, |
| | | | | | | | | 193500, 193500, 193500, 193500, |
| | | | | | | | | 201460, 205100, 237300, 262000, |
| | | | | | | | | 600266, 601277 |
| 89 | HLDON23 | 636083 | 99 | 368-709 | 388 | Arg-28 to Gln-36. | 15q23 | 118485, 151670, 231680, 272800, |
| | | | | | | | | 272800, 272800, 276700, 600374, |
| | | | | | | | | 601780 |
| 90 | HLDOW79 | 847396 | 100 | 43-870 | 389 | Pro-171 to Gln-179, | | |
| | | | | | | Leu-218 to Lys-225, | | |
| | | | | | | Phe-266 to Cys-275. | | |
| 91 | HLJBJ61 | 1019012 | 101 | 158-274 | 390 | | 19 | |
| | HLJBJ61 | 833665 | 235 | 227-343 | 524 | | | |
| 92 | HLQDH79 | 588446 | 102 | 205-381 | 391 | | 3p21.2-p21.3 | 116806, 120120, 120120, 120120, |
| | | | | | | | | 120436, 120436, 120436, 138320, |
| | | | | | | | | 168468, 182280, 238310, 600163, 601226 |
| 93 | HLTHG37 | 787530 | 103 | 50-1006 | 392 | Asn-36 to Lys-42, | | |
| | | | | | | Lys-53 to Gln-60, | | |
| | | | | | | Ile-64 to Ala-77, | | |
| | | | | | | Ala-128 to Tyr-135, | | |
| | | | | | | Lys-184 to Ala-199, | | |
| | | | | | | Leu-245 to Leu-250. | | |
| | HLTHG37 | 743169 | 236 | 313-441 | 525 | | | |
| 94 | HLWAE11 | 783071 | 104 | 28-861 | 393 | Asp-55 to Asp-67, | 22q13.1 | 103050, 103050, 124030, 124030, |
| | | | | | | Ser-76 to His-81, | | 138981, 182380, 188826, 190040, |
| | | | | | | Lys-96 to Gly-103, | | 190040, 190040 |
| | | | | | | Met-111 to Gly-133, | | |
| | | | | | | Gln-222 to Ile-228, | | |
| | | | | | | Lys-250 to Tyr-258. | | |
| 95 | HLWAY54 | 658702 | 105 | 38-1054 | 394 | Asp-27 to Ser-32, | 12p13.31 | 125370, 601458 |
| | | | | | | Pro-52 to Thr-58, | | |
| | | | | | | Arg-63 to Asn-70, | | |
| | | | | | | Gln-78 to Gly-83, | | |
| | | | | | | Thr-107 to Asn-113, | | |
| | | | | | | Thr-160 to Val-176, | | |
| | | | | | | Ser-188 to Gly-241, | | |
| | | | | | | Leu-248 to Pro-265, | | |
| | | | | | | Tyr-302 to Gly-314. | | |
| 96 | HLWCF05 | 460619 | 106 | 155-328 | 395 | | | |
| 97 | HLYAF80 | 460622 | 107 | 222-365 | 396 | | | |
| 98 | HLYAZ61 | 1352163 | 108 | 190-855 | 397 | Asp-59 to Asn-65, | 3q25.1 | 222900, 601402 |
| | | | | | | Lys-72 to Trp-79, | | |
| | | | | | | Tyr-110 to Val-121, | | |
| | | | | | | Ala-204 to Leu-216. | | |
| | HLYAZ61 | 423998 | 237 | 205-852 | 526 | Asp-59 to Asn-65, | | |
| | | | | | | Lys-72 to Trp-79, | | |
| | | | | | | Tyr-110 to Val-121, | | |
| | | | | | | Ala-204 to Asn-215. | | |
| 99 | HMADS41 | 596831 | 109 | 267-533 | 398 | | 8p23 | 148370 |
| 100 | HMADU73 | 1352177 | 110 | 491-2629 | 399 | Arg-48 to Asn-56, | 14q11.2 | 182600, 186880, 190195, 190195, |
| | | | | | | Gly-166 to Ser-175, | | 222700, 600243, 602279, 602279 |
| | | | | | | Tyr-250 to Leu-261, | | |
| | | | | | | Glu-329 to Gly-355, | | |
| | | | | | | Ala-378 to Tyr-383, | | |
| | | | | | | Gly-390 to Tyr-413, | | |
| | | | | | | Pro-422 to Cys-433, | | |
| | | | | | | Gln-491 to Tyr-496, | | |
| | | | | | | Phe-511 to Ser-520, | | |
| | | | | | | Pro-542 to Arg-551, | | |
| | | | | | | Arg-568 to Val-582, | | |
| | | | | | | Gly-595 to Glu-601, | | |
| | | | | | | Gln-608 to Pro-614, | | |
| | | | | | | Pro-669 to Pro-678. | | |
| | HMADU73 | 467053 | 238 | 115-348 | 527 | Arg-48 to Asn-56. | | |
| 101 | HMIAL37 | 603201 | 111 | 49-342 | 400 | Pro-18 to Lys-26. | 11p14.3 | 602092 |
| 102 | HMKCG09 | 548078 | 112 | 221-370 | 401 | | | |
| 103 | HMMAH60 | 562776 | 113 | 142-294 | 402 | Ser-20 to Ser-34, | | |
| | | | | | | Thr-40 to Ser-46. | | |
| 104 | HMQDT36 | 1309723 | 114 | 157-1377 | 403 | Glu-78 to Asn-83, | 9q22.33 | 278700, 602088 |
| | | | | | | Asp-91 to Gln-100, | | |
| | | | | | | Glu-122 to Ser-128, | | |
| | | | | | | Arg-137 to Pro-143, | | |
| | | | | | | Asp-157 to Asn-162, | | |
| | | | | | | Glu-168 to Asn-174, | | |
| | | | | | | Ser-199 to Gly-206, | | |
| | | | | | | Pro-213 to Ala-218, | | |
| | | | | | | Glu-251 to Thr-257, | | |
| | | | | | | Ser-353 to His-361, | | |
| | | | | | | Gly-363 to Ala-375, | | |
| | | | | | | Pro-382 to Phe-387, | | |
| | | | | | | Arg-401 to Leu-406. | | |
| | HMQDT36 | 424085 | 239 | 192-1412 | 528 | Glu-78 to Asn-83, | | |
| | | | | | | Asp-91 to Gln-100, | | |
| | | | | | | Glu-122 to Ser-128, | | |
| | | | | | | Arg-137 to Pro-143, | | |
| | | | | | | Asp-157 to Asn-162, | | |
| | | | | | | Glu-168 to Asn-174, | | |
| | | | | | | Ser-199 to Gly-206, | | |
| | | | | | | Pro-213 to Ala-218, | | |
| | | | | | | Glu-251 to Thr-257, | | |
| | | | | | | Ser-353 to His-361, | | |
| | | | | | | Gly-363 to Ala-375, | | |
| | | | | | | Pro-382 to Phe-387, | | |
| | | | | | | Arg-401 to Leu-406. | | |
| 105 | HMSHS36 | 1127691 | 115 | 134-445 | 404 | Thr-28 to Arg-49, | | |
| | | | | | | Ser-57 to Arg-64, | | |
| | | | | | | Pro-72 to His-78. | | |
| | HMSHS36 | 1028961 | 240 | 162-473 | 529 | Thr-28 to Arg-49, | | |
| | | | | | | Ser-57 to Arg-64. | | |
| 106 | HMSJU68 | 427121 | 116 | 272-421 | 405 | Met-1 to Gly-7. | | |
| 107 | HMSKC04 | 799540 | 117 | 133-354 | 406 | Thr-27 to Arg-33, | | |
| | | | | | | Gly-37 to Ser-42, | | |
| | | | | | | Pro-52 to Arg-72. | | |
| 108 | HMTAD67 | 588447 | 118 | 306-560 | 407 | Pro-43 to Leu-49, | | |
| | | | | | | Pro-61 to Gly-66, | | |
| | | | | | | Ser-71 to Ser-83. | | |
| 109 | HMWFO02 | 1352198 | 119 | 7-210 | 408 | Pro-60 to Arg-68. | | |
| | HMWFO02 | 542061 | 241 | 20-202 | 530 | | | |
| 110 | HMWFY10 | 825421 | 120 | 367-456 | 409 | | | |
| | HMWFY10 | 490495 | 242 | 129-185 | 531 | | | |
| 111 | HNGBT31 | 408334 | 121 | 224-538 | 410 | Ala-83 to Thr-91. | | |
| 112 | HNGEO29 | 532622 | 122 | 98-232 | 411 | Met-1 to Arg-8, | | |
| | | | | | | Leu-35 to Glu-41. | | |
| 113 | HNGIQ46 | 526651 | 123 | 221-433 | 412 | Ala-28 to Gly-34, | | |
| | | | | | | Pro-57 to Thr-66. | | |
| 114 | HNGJP69 | 604891 | 124 | 321-545 | 413 | | | |
| 115 | HNGOI12 | 1041375 | 125 | 27-200 | 414 | Met-1 to Gly-9. | 11 | |
| | HNGOI12 | 838184 | 243 | 27-200 | 532 | Met-1 to Gly-9. | | |
| | HNGOI12 | 839283 | 244 | 596-877 | 533 | | | |
| 116 | HNHOD46 | 843488 | 126 | 12-251 | 415 | | | |
| 117 | HNTBL27 | 545534 | 127 | 100-447 | 416 | Arg-45 to Thr-52, | 3p21.31 | 116806, 168468, 182280, 212138, 600163 |
| | | | | | | Tyr-60 to Gly-66, | | |
| | | | | | | Ala-87 to Trp-92, | | |
| | | | | | | Leu-105 to Ser-115. | | |
| 118 | HNTN101 | 1352285 | 128 | 307-534 | 417 | Lys-71 to Trp-76. | | |
| | HNTN101 | 699848 | 245 | 306-455 | 534 | | | |
| 119 | HOAAC90 | 1301202 | 129 | 33-347 | 418 | Trp-25 to Pro-33, | | |
| | | | | | | Gln-88 to Pro-93. | | |
| | HOAAC90 | 518979 | 246 | 38-352 | 535 | Trp-25 to Pro-33, | | |
| | | | | | | Gln-88 to Pro-93. | | |
| 120 | HOCNF19 | 835049 | 130 | 166-429 | 419 | Thr-45 to Pro-56, | | |
| | | | | | | Ser-66 to Lys-74. | | |
| 121 | HODDW40 | 579256 | 131 | 139-261 | 420 | | | |
| 122 | HODFN71 | 1194866 | 132 | 1-477 | 421 | Lys-50 to Phe-57, | | |
| | | | | | | Ser-70 to Arg-77, | | |
| | | | | | | Tyr-81 to Ser-87, | | |
| | | | | | | Pro-112 to Thr-117. | | |
| | HODFN71 | 834999 | 247 | 27-473 | 536 | Lys-39 to Phe-46, | | |
| | | | | | | Ser-59 to Arg-66, | | |
| | | | | | | Tyr-70 to Ser-76, | | |
| | | | | | | Pro-101 to Thr-106. | | |
| 123 | HOEBZ89 | 828177 | 133 | 19-1020 | 422 | Lys-34 to Glu-39, | | |
| | | | | | | Ile-47 to Ser-53, | | |
| | | | | | | Pro-106 to Leu-111, | | |
| | | | | | | Pro-140 to Gly-146, | | |
| | | | | | | Glu-195 to Gly-204, | | |
| | | | | | | Leu-281 to Thr-288, | | |
| | | | | | | Glu-291 to Arg-297, | | |
| | | | | | | Tyr-302 to Ile-308. | | |
| 124 | HOEDB32 | 634994 | 134 | 104-784 | 423 | Pro-34 to Ser-43, | 17q11.2 | 154275, 162200, 162200, 182138, |
| | | | | | | Glu-54 to Ser-60. | | 239100, 600881, 601954, 602403 |
| 125 | HOEDH84 | 748236 | 135 | 256-1467 | 424 | Ser-74 to Ala-84, | | |
| | | | | | | Gln-156 to Tyr-161, | | |
| | | | | | | Tyr-184 to Asn-189, | | |
| | | | | | | Ser-218 to Ile-223, | | |
| | | | | | | Pro-299 to Ser-308, | | |
| | | | | | | His-359 to Thr-368, | | |
| | | | | | | Tyr-390 to Asp-404. | | |
| 126 | HOFNC14 | 1352378 | 136 | 79-297 | 425 | | | |
| | HOFNC14 | 899292 | 248 | 155-373 | 537 | | | |
| 127 | HOFND85 | 847424 | 137 | 167-2047 | 426 | Asp-216 to Gly-224, | | |
| | | | | | | Asp-268 to Asn-274, | | |
| | | | | | | Thr-285 to Lys-290, | | |
| | | | | | | Asp-339 to Pro-345, | | |
| | | | | | | Ile-356 to Pro-361, | | |
| | | | | | | Arg-371 to Asn-378, | | |
| | | | | | | Ala-408 to Tyr-417, | | |
| | | | | | | Pro-429 to Gln-434, | | |
| | | | | | | Arg-461 to Pro-466, | | |
| | | | | | | Ala-475 to Ala-482. | | |
| 128 | HOFOC33 | 1186156 | 138 | 76-1167 | 427 | Thr-28 to Tyr-40, | | |
| | | | | | | Gln-61 to Ser-68, | | |
| | | | | | | Glu-74 to Lys-95, | | |
| | | | | | | Glu-163 to Thr-169, | | |
| | | | | | | Arg-197 to His-204, | | |
| | | | | | | Ser-210 to Phe-216, | | |
| | | | | | | Thr-272 to Asp-278, | | |
| | | | | | | Arg-286 to Gly-291, | | |
| | | | | | | Cys-310 to Ala-316. | | |
| | HOFOC33 | 967554 | 249 | 81-419 | 538 | Thr-28 to Tyr-40, | | |
| | | | | | | Gln-61 to Ser-68, | | |
| | | | | | | Glu-74 to Leu-94. | | |
| | HOFOC33 | 878690 | 250 | 81-419 | 539 | Thr-28 to Tyr-40, | | |
| | | | | | | Gln-61 to Ser-68. | | |
| | HOFOC33 | 905734 | 251 | 76-495 | 540 | Thr-28 to Tyr-40, | | |
| | | | | | | Gln-61 to Ser-68, | | |
| | | | | | | Glu-74 to Lys-95, | | |
| | | | | | | Thr-119 to Leu-124, | | |
| | | | | | | Pro-126 to Gln-131. | | |
| | HOFOC33 | 902326 | 252 | 23-46 | 541 | | | |
| | HOFOC33 | 885140 | 253 | 158-202 | 542 | | | |
| | HOFOC33 | 806819 | 254 | 3-866 | 543 | | | |
| 129 | HOGCK20 | 745445 | 139 | 57-1622 | 428 | Pro-25 to Arg-31, | 20q12-q13.12 | 600281, 600281, 602025 |
| | | | | | | Thr-52 to Val-63, | | |
| | | | | | | Asn-129 to Lys-135, | | |
| | | | | | | Gln-197 to Trp-202, | | |
| | | | | | | Thr-230 to Glu-236, | | |
| | | | | | | Pro-242 to Tyr-248, | | |
| | | | | | | Leu-280 to Pro-291, | | |
| | | | | | | Ser-348 to Ser-356, | | |
| | | | | | | Pro-362 to Gln-368, | | |
| | | | | | | Thr-398 to His-406, | | |
| | | | | | | Trp-430 to Leu-435, | | |
| | | | | | | Glu-499 to Gly-504. | | |
| | HOGCK20 | 664499 | 255 | 53-1717 | 544 | Pro-24 to Arg-30, | | |
| | | | | | | Thr-51 to Val-62, | | |
| | | | | | | Asn-128 to Lys-134, | | |
| | | | | | | Gln-196 to Trp-201, | | |
| | | | | | | Thr-229 to Glu-235, | | |
| | | | | | | Pro-241 to Tyr-247, | | |
| | | | | | | Leu-279 to Pro-290, | | |
| | | | | | | Ser-347 to Ser-355, | | |
| | | | | | | Pro-361 to Gln-367, | | |
| | | | | | | Thr-397 to His-405, | | |
| | | | | | | Trp-429 to Leu-434, | | |
| | | | | | | Gln-510 to Val-518. | | |
| 130 | HOGCS52 | 919898 | 140 | 25-1383 | 429 | Met-28 to Arg-34, | | |
| | | | | | | Thr-154 to Arg-173, | | |
| | | | | | | Gly-180 to Tyr-185, | | |
| | | | | | | Leu-226 to Asp-231, | | |
| | | | | | | Leu-272 to Lys-277, | | |
| | | | | | | Thr-378 to Asn-383, | | |
| | | | | | | Asp-421 to Tyr-433, | | |
| | | | | | | Leu-442 to Ala-451. | | |
| | HOGCS52 | 907118 | 256 | 30-1391 | 545 | Met-28 to Arg-34, | | |
| | | | | | | Thr-154 to Arg-173, | | |
| | | | | | | Gly-180 to Tyr-185, | | |
| | | | | | | Leu-226 to Asp-231, | | |
| | | | | | | Leu-272 to Lys-277, | | |
| | | | | | | Thr-378 to Asn-383, | | |
| | | | | | | Asp-421 to Arg-431. | | |
| | HOGCS52 | 867965 | 257 | 2-289 | 546 | Ala-1 to Ala-6. | | |
| 131 | HOUCQ17 | 429229 | 141 | 508-3408 | 430 | Gly-8 to Leu-14, | | |
| | | | | | | Met-18 to Phe-30. | | |
| 132 | HOUDK26 | 565393 | 142 | 214-735 | 431 | Ser-139 to Ser-144, | | |
| | | | | | | Phe-153 to Leu-159, | | |
| | | | | | | Gln-162 to Ser-170. | | |
| 133 | HOVCA92 | 527644 | 143 | 181-369 | 432 | | | |
| 134 | HPJBK12 | 1011467 | 144 | 126-272 | 433 | | 4, 8 | |
| | HPJBK12 | 525375 | 258 | 119-265 | 547 | | | |
| | HPJBK12 | 796925 | 259 | 969-1001 | 548 | | | |
| | HPJBK12 | 699587 | 260 | 509-523 | 549 | | | |
| 135 | HPJEX20 | 1352420 | 145 | 23-544 | 434 | Gln-102 to Ser-108. | 1 | |
| | HPJEX20 | 1184442 | 261 | 31-375 | 550 | | | |
| | HPJEX20 | 975252 | 262 | 170-694 | 551 | Gln-102 to Ser-108. | | |
| | HPJEX20 | 894744 | 263 | 84-767 | 552 | | | |
| | HPJEX20 | 898220 | 264 | 565-816 | 553 | Ser-23 to Thr-32, | | |
| | | | | | | Ala-37 to Gln-44. | | |
| 136 | HPMAI22 | 635491 | 146 | 483-662 | 435 | | | |
| 137 | HPRBC80 | 829136 | 147 | 94-1254 | 436 | Asp-6 to His-13, | 2p21 | 120435, 120435, 126600, 135300, |
| | | | | | | Asp-114 to Gly-131, | | 136435, 152790, 152790, 157170, |
| | | | | | | Thr-166 to Gln-181, | | 182601, 601771 |
| | | | | | | Val-210 to Thr-216, | | |
| | | | | | | Pro-222 to Tyr-227. | | |
| | HPRBC80 | 720095 | 265 | 404-613 | 554 | | | |
| 138 | HPRSB76 | 526310 | 148 | 127-306 | 437 | | 15q11-q13 | 103581, 146150, 176270, 218000, |
| | | | | | | | | 227220, 601623, 601800, 601889, |
| | | | | | | | | 602117 |
| 139 | HPWAY46 | 1001560 | 149 | 468-626 | 438 | | 4 | |
| | HPWAY46 | 876469 | 266 | 474-632 | 555 | | | |
| | HPWAY46 | 789574 | 267 | 178-435 | 556 | | | |
| 140 | HPWAZ95 | 413270 | 150 | 88-321 | 439 | | | |
| 141 | HRACD15 | 871221 | 151 | 252-410 | 440 | | | |
| | HRACD15 | 706332 | 268 | 252-413 | 557 | | | |
| 142 | HRDFD27 | 567004 | 152 | 82-333 | 441 | | | |
| 143 | HSAVD46 | 456536 | 153 | 155-328 | 442 | | | |
| 144 | HSAWZ41 | 580872 | 154 | 98-271 | 443 | Ile-46 to Tyr-56. | | |
| 145 | HSAYM40 | 462797 | 155 | 190-381 | 444 | | | |
| 146 | HSDEZ20 | 1352287 | 156 | 58-423 | 445 | Phe-8 to Ser-13, | | |
| | | | | | | Val-81 to Arg-87, | | |
| | | | | | | Asp-98 to Pro-104. | | |
| | HSDEZ20 | 704101 | 269 | 66-359 | 558 | Phe-8 to Ser-13, | | |
| | | | | | | Ala-84 to Ser-90. | | |
| 147 | HSDJA15 | 795252 | 157 | 247-705 | 446 | Thr-32 to Lys-40, | | |
| | | | | | | Lys-146 to Glu-152. | | |
| 148 | HSDSB09 | 1301498 | 158 | 16-423 | 447 | Glu-33 to Glu-56, | | |
| | | | | | | Thr-75 to Cys-81. | | |
| | HSDSB09 | 463645 | 270 | 22-387 | 559 | Glu-33 to Glu-56, | | |
| | | | | | | Thr-75 to Cys-81. | | |
| 149 | HSFAM31 | 552789 | 159 | 44-73 | 448 | Leu-3 to Asn-9. | | |
| 150 | HSHAX21 | 612823 | 160 | 177-392 | 449 | Leu-23 to Met-30. | 4 | |
| 151 | HSQCM10 | 638591 | 161 | 130-318 | 450 | Pro-22 to Lys-29. | 9p13-p12 | 230400, 250250 |
| 152 | HSSGD52 | 1352343 | 162 | 344-2161 | 451 | Pro-7 to Cys-12, | 14q11.2 | 182600, 186880, 190195, 190195, |
| | | | | | | Lys-48 to Tyr-62, | | 222700, 600243, 602279, 602279 |
| | | | | | | Arg-182 to His-187, | | |
| | | | | | | Leu-189 to Glu-196, | | |
| | | | | | | Thr-211 to Gly-226, | | |
| | | | | | | Leu-270 to Thr-275, | | |
| | | | | | | Gly-278 to Gly-289, | | |
| | | | | | | Pro-444 to Asn-449, | | |
| | | | | | | Glu-453 to Lys-461, | | |
| | | | | | | Gly-491 to Thr-496, | | |
| | | | | | | Ser-525 to Trp-532. | | |
| | HSSGD52 | 845666 | 271 | 338-2155 | 560 | Pro-7 to Cys-12, | | |
| | | | | | | Lys-48 to Tyr-62, | | |
| | | | | | | Arg-182 to His-187, | | |
| | | | | | | Leu-189 to Glu-196, | | |
| | | | | | | Thr-211 to Gly-226, | | |
| | | | | | | Leu-270 to Thr-275, | | |
| | | | | | | Gly-278 to Gly-289, | | |
| | | | | | | Pro-444 to Asn-449, | | |
| | | | | | | Glu-453 to Lys-461, | | |
| | | | | | | Gly-491 to Thr-496, | | |
| | | | | | | Ser-525 to Trp-532. | | |
| 153 | HSSJC35 | 1306937 | 163 | 62-949 | 452 | Pro-40 to Arg-50, | | |
| | | | | | | Ser-72 to Arg-77, | | |
| | | | | | | His-82 to Leu-91, | | |
| | | | | | | Gln-171 to Glu-189, | | |
| | | | | | | Val-203 to Gly-222, | | |
| | | | | | | Pro-263 to Thr-269, | | |
| | | | | | | Ser-282 to Trp-287. | | |
| | HSSJC35 | 745409 | 272 | 55-939 | 561 | Pro-40 to Arg-50, | | |
| | | | | | | Ser-72 to Arg-77, | | |
| | | | | | | His-82 to Leu-91, | | |
| | | | | | | Gln-171 to Glu-189, | | |
| | | | | | | Val-203 to Gly-222, | | |
| | | | | | | Pro-263 to Thr-269, | | |
| | | | | | | Ser-282 to Trp-287. | | |
| | HSSJC35 | 716424 | 273 | 66-176 | 562 | Arg-32 to Leu-37. | | |
| 154 | HSXEC75 | 634032 | 164 | 295-432 | 453 | | 9q22.31 | 278700, 602088 |
| 155 | HSYAZ50 | 1027673 | 165 | 131-301 | 454 | | 2 | |
| | HSYAZ50 | 852318 | 274 | 345-515 | 563 | | | |
| | HSYAZ50 | 902235 | 275 | 723-1040 | 564 | Arg-1 to Asn-9, | | |
| | | | | | | Pro-24 to Ile-32, | | |
| | | | | | | Val-95 to Cys-106. | | |
| | HSYAZ50 | 882732 | 276 | 2-838 | 565 | Glu-1 to Glu-8, | | |
| | | | | | | Pro-38 to Gly-45, | | |
| | | | | | | Leu-53 to Gly-60, | | |
| | | | | | | Glu-112 to Arg-117, | | |
| | | | | | | Lys-153 to Lys-163, | | |
| | | | | | | Trp-245 to Ala-251, | | |
| | | | | | | Phe-259 to Gly-273. | | |
| 156 | HSYBG37 | 1056317 | 166 | 47-964 | 455 | Ser-47 to Pro-57, | 16p13.3 | 141750, 141800, 141800, 141800, |
| | | | | | | Ser-77 to Glu-82, | | 141800, 141850, 141850, 141850, |
| | | | | | | Thr-90 to Trp-98, | | 141850, 141850, 156850, 186580, |
| | | | | | | Arg-124 to Lys-137, | | 191092, 600140, 600273, 601313, |
| | | | | | | Ala-183 to Glu-192, | | 601785 |
| | | | | | | Lys-220 to Gln-229, | | |
| | | | | | | Asn-244 to Arg-258, | | |
| | | | | | | Thr-271 to Asn-278, | | |
| | | | | | | Glu-285 to Gly-297. | | |
| | HSYBG37 | 581098 | 277 | 48-965 | 566 | Ser-47 to Pro-57, | | |
| | | | | | | Ser-77 to Glu-82, | | |
| | | | | | | Thr-90 to Trp-98, | | |
| | | | | | | Arg-124 to Lys-137, | | |
| | | | | | | Ala-183 to Glu-192, | | |
| | | | | | | Lys-220 to Gln-229, | | |
| | | | | | | Asn-244 to Arg-258, | | |
| | | | | | | Thr-271 to Asn-278, | | |
| | | | | | | Glu-285 to Gly-297. | | |
| 157 | HSZAF47 | 1352172 | 167 | 106-972 | 456 | Gly-16 to Pro-30, | 4p16-p15 | 225500, 600593, 602363 |
| | | | | | | Pro-42 to Gly-56, | | |
| | | | | | | Gly-62 to Gly-77, | | |
| | | | | | | Glu-93 to Gly-104, | | |
| | | | | | | Glu-109 to Glu-114, | | |
| | | | | | | Pro-121 to Gly-134, | | |
| | | | | | | Ser-157 to Arg-162, | | |
| | | | | | | Glu-174 to Thr-182, | | |
| | | | | | | Ile-283 to Leu-289. | | |
| | HSZAF47 | 456551 | 278 | 107-490 | 567 | Gly-16 to Pro-30, | | |
| | | | | | | Pro-42 to Gly-56, | | |
| | | | | | | Gly-62 to Gly-77, | | |
| | | | | | | Glu-93 to Gly-104, | | |
| | | | | | | Glu-109 to Glu-114, | | |
| | | | | | | Pro-121 to Asp-126. | | |
| 158 | HTADX17 | 753289 | 168 | 92-520 | 457 | Glu-15 to Arg-23, | 1q23.1 | 107300, 131210, 136132, 145001, |
| | | | | | | Asn-79 to Gly-84, | | 173610, 601652 |
| | | | | | | Ser-101 to Gly-106, | | |
| | | | | | | Ser-111 to Asn-116. | | |
| | HTADX17 | 457172 | 279 | 84-512 | 568 | Glu-15 to Arg-23, | | |
| | | | | | | Asn-79 to Gly-84. | | |
| 159 | HTEAF65 | 866485 | 169 | 135-362 | 458 | Phe-30 to Lys-37, | | |
| | | | | | | Pro-43 to Lys-75. | | |
| 160 | HTEBI28 | 462221 | 170 | 43-246 | 459 | Arg-24 to Arg-41, | | |
| | | | | | | Pro-56 to Trp-64. | | |
| 161 | HTEHR24 | 835894 | 171 | 84-572 | 460 | Met-1 to Thr-6, | 6q16.1 | 136550, 602772 |
| | | | | | | Gly-45 to Asn-61, | | |
| | | | | | | Ala-63 to Asn-72. | | |
| | HTEHR24 | 513039 | 280 | 41-415 | 569 | Met-1 to Thr-6, | | |
| | | | | | | Gly-45 to Asn-74. | | |
| 162 | HTEHU31 | 600394 | 172 | 121-1059 | 461 | Leu-67 to Glu-73, | 20q11.2 | 139190, 139190, 224100, 601002, |
| | | | | | | Arg-83 to Gln-92, | | 601002, 601146, 601146, 601146 |
| | | | | | | Leu-124 to Tyr-134, | | |
| | | | | | | Gln-146 to Thr-157. | | |
| 163 | HTEHU93 | 722254 | 173 | 188-616 | 462 | Arg-21 to Thr-29, | 20pter-q11.23 | |
| | | | | | | Tyr-56 to Lys-63, | | |
| | | | | | | Ser-93 to Ser-100, | | |
| | | | | | | Glu-109 to Lys-116. | | |
| | HTEHU93 | 423009 | 281 | 187-528 | 570 | Arg-21 to Thr-29. | | |
| 164 | HTEIP36 | 520468 | 174 | 22-198 | 463 | Glu-33 to Arg-45. | | |
| 165 | HTEIV80 | 584798 | 175 | 203-346 | 464 | | | |
| 166 | HTEPG70 | 834931 | 176 | 365-634 | 465 | Arg-71 to Ala-82. | | |
| 167 | HTHBG43 | 919911 | 177 | 47-166 | 466 | | 1 | |
| | HTHBG43 | 906282 | 282 | 149-268 | 571 | | | |
| 168 | HTJMA95 | 706618 | 178 | 527-1069 | 467 | Gly-85 to Lys-94, | 15q25 | 231680, 276700 |
| | | | | | | Gln-125 to Cys-131, | | |
| | | | | | | Glu-151 to Gly-159. | | |
| 169 | HTLFE42 | 460583 | 179 | 116-349 | 468 | Ser-22 to Thr-32, | | |
| | | | | | | Pro-37 to Ser-42. | | |
| 170 | HTLIT32 | 833906 | 180 | 288-1028 | 469 | Ser-83 to Tyr-88, | | |
| | | | | | | Ala-129 to Ser-134, | | |
| | | | | | | Ser-227 to Ala-233. | | |
| 171 | HTLIV19 | 1046341 | 181 | 110-364 | 470 | | 3 | |
| 172 | HTOAK16 | 560744 | 182 | 87-419 | 471 | Asp-27 to Ser-36. | | |
| 173 | HTOHD42 | 604983 | 183 | 155-727 | 472 | Gly-33 to Arg-40, | | |
| | | | | | | Ser-106 to Met-112, | | |
| | | | | | | Ala-154 to Gly-163. | | |
| 174 | HTOHM15 | 1028538 | 184 | 30-215 | 473 | | | |
| | HTOHM15 | 848199 | 283 | 23-208 | 572 | | | |
| | HTOHM15 | 848200 | 284 | 71-1036 | 573 | Arg-1 to Gly-7, | | |
| | | | | | | Phe-11 to Arg-23. | | |
| | HTOHM15 | 848196 | 285 | 1555-1596 | 574 | | | |
| 175 | HTPBW79 | 1317835 | 185 | 178-1263 | 474 | Leu-21 to Ala-30, | 11 | |
| | | | | | | Ser-38 to Asp-47, | | |
| | | | | | | Pro-87 to Asp-94, | | |
| | | | | | | Leu-197 to Thr-204, | | |
| | | | | | | Pro-256 to Ser-262, | | |
| | | | | | | Thr-277 to Arg-282, | | |
| | | | | | | Thr-293 to Val-302, | | |
| | | | | | | Lys-315 to Arg-321. | | |
| | HTPBW79 | 581435 | 286 | 302-1390 | 575 | Leu-21 to Ala-30, | | |
| | | | | | | Ser-38 to Asp-47, | | |
| | | | | | | Pro-87 to Asp-94, | | |
| | | | | | | Leu-197 to Thr-204, | | |
| | | | | | | Pro-256 to Ser-262, | | |
| | | | | | | Thr-277 to Arg-282, | | |
| | | | | | | Thr-293 to Trp-303. | | |
| | HTPBW79 | 396459 | 287 | 92-1336 | 576 | Leu-21 to Ala-30, | | |
| | | | | | | Ser-38 to Asp-47, | | |
| | | | | | | Pro-87 to Asp-94, | | |
| | | | | | | Leu-197 to Arg-202, | | |
| | | | | | | Pro-287 to Ser-293, | | |
| | | | | | | Thr-308 to Arg-313, | | |
| | | | | | | Thr-324 to Trp-334. | | |
| 176 | HTTDB46 | 812763 | 186 | 55-1011 | 475 | Tyr-67 to Pro-74, | | |
| | | | | | | Ser-117 to Gln-123, | | |
| | | | | | | Pro-161 to Met-185, | | |
| | | | | | | Gly-224 to His-242, | | |
| | | | | | | Thr-299 to Trp-307. | | |
| | HTTDB46 | 909573 | 288 | 153-1535 | 577 | Tyr-67 to Pro-74, | | |
| | | | | | | Ser-117 to Gln-123, | | |
| | | | | | | Pro-161 to Met-185. | | |
| 177 | HTXCV12 | 1352213 | 187 | 175-480 | 476 | Gln-29 to Gly-38, | | |
| | | | | | | Lys-57 to Asp-62. | | |
| | HTXCV12 | 567006 | 289 | 183-458 | 578 | Gln-29 to Gly-38, | | |
| | | | | | | Lys-57 to Asp-62. | | |
| 178 | HTXDW56 | 695765 | 188 | 217-822 | 477 | Glu-24 to Tyr-35, | 1p36.13-q41 | 115665, 120550, 120570, 120575, |
| | | | | | | Arg-83 to Thr-92, | | 130500, 133200, 167410, 172430, |
| | | | | | | Pro-148 to Gly-154. | | 600975 |
| 179 | HTXFL30 | 620001 | 189 | 30-338 | 478 | Met-1 to Gly-6, | 3 | |
| | | | | | | Arg-11 to Gly-21. | | |
| 180 | HTXKP61 | 824083 | 190 | 169-297 | 479 | | 1p34 | 130500, 133200, 138140, 168360, |
| | | | | | | | | 171760, 171760, 176100, 176100, |
| | | | | | | | | 178300, 230000, 255800 |
| 181 | HUKAH51 | 1352424 | 191 | 286-738 | 480 | Trp-35 to Trp-45, | | |
| | | | | | | Pro-52 to Asp-57, | | |
| | | | | | | Thr-73 to Arg-82, | | |
| | | | | | | Pro-105 to Leu-112, | | |
| | | | | | | Pro-115 to Arg-127, | | |
| | | | | | | Pro-140 to Gln-151. | | |
| | HUKAH51 | 1300737 | 290 | 144-572 | 579 | Trp-35 to Trp-45, | | |
| | | | | | | Pro-52 to Asp-57, | | |
| | | | | | | Thr-73 to Thr-80, | | |
| | | | | | | Pro-96 to Leu-103, | | |
| | | | | | | Pro-106 to Arg-118, | | |
| | | | | | | Pro-131 to Gln-142. | | |
| | HUKAH51 | 603538 | 291 | 55-414 | 580 | Trp-35 to Trp-45, | | |
| | | | | | | Pro-52 to Asp-57, | | |
| | | | | | | Thr-73 to Thr-80, | | |
| | | | | | | Pro-96 to Leu-103, | | |
| | | | | | | Pro-106 to Leu-119. | | |
| 182 | HUKBT29 | 694590 | 192 | 74-1594 | 481 | Thr-35 to Lys-43, | 1q42 | 106150, 106150, 145260, 173870, |
| | | | | | | Pro-59 to Arg-64. | | 173870, 600759, 600996, 601744, |
| | | | | | | | | 601975 |
| 183 | HUSBA88 | 895435 | 193 | 270-2117 | 482 | Glu-32 to Arg-38, | 9q34 | 125270, 125270, 128100, 137350, |
| | | | | | | Gln-56 to Asn-64, | | 191100, 215700, 223360, 268900, |
| | | | | | | Ser-69 to His-83, | | 601850 |
| | | | | | | Arg-87 to Gln-118, | | |
| | | | | | | Leu-137 to Thr-146, | | |
| | | | | | | Pro-148 to Gly-157, | | |
| | | | | | | Trp-177 to Ala-184, | | |
| | | | | | | Asp-188 to Ser-194, | | |
| | | | | | | Lys-221 to Arg-227, | | |
| | | | | | | Arg-283 to Pro-289, | | |
| | | | | | | Pro-302 to Asp-308, | | |
| | | | | | | Thr-328 to Phe-333, | | |
| | | | | | | Ser-348 to Gly-353, | | |
| | | | | | | Gly-392 to Leu-400, | | |
| | | | | | | Arg-416 to Lys-422, | | |
| | | | | | | Tyr-493 to Glu-502, | | |
| | | | | | | Thr-527 to Trp-535, | | |
| | | | | | | Asn-559 to Met-572. | | |
| 184 | HWBAR88 | 836469 | 194 | 156-383 | 483 | | 6q24.3 | 600320 |
| 185 | HWBCB89 | 1093347 | 195 | 37-600 | 484 | Gln-20 to Phe-25, | 1q24-q41 | 107300, 131210, 136132, 145001, |
| | | | | | | Gly-58 to Ala-66, | | 145260, 173610, 276901, 600332, |
| | | | | | | Gln-69 to Leu-74, | | 600759, 601518, 601652, 601744, |
| | | | | | | Asn-87 to Ile-100, | | 601975 |
| | | | | | | Thr-135 to Trp-142. | | |
| | HWBCB89 | 886210 | 292 | 35-598 | 581 | Gln-20 to Phe-25, | | |
| | | | | | | Gly-58 to Ala-66, | | |
| | | | | | | Gln-69 to Leu-74, | | |
| | | | | | | Asn-87 to Ile-100, | | |
| | | | | | | Thr-135 to Trp-142. | | |
| 186 | HWBCP79 | 846382 | 196 | 243-560 | 485 | Trp-47 to Thr-54, | | |
| | | | | | | Ser-68 to Asn-73, | | |
| | | | | | | Ser-86 to Gly-92. | | |
| | HWBCP79 | 646977 | 293 | 233-550 | 582 | Trp-47 to Thr-54. | | |
| 187 | HWHGP71 | 995431 | 197 | 389-1021 | 486 | His-56 to Val-62, | | |
| | | | | | | Gly-105 to His-113, | | |
| | | | | | | Cys-141 to Trp-147, | | |
| | | | | | | His-149 to Arg-155, | | |
| | | | | | | Glu-159 to Pro-172. | | |
| | HWHGP71 | 839250 | 294 | 394-627 | 583 | Pro-49 to Ser-54, | | |
| | | | | | | Thr-68 to Thr-77. | | |
| 188 | HWHQS55 | 762842 | 198 | 169-2397 | 487 | Val-35 to Lys-41, | | |
| | | | | | | Ser-68 to Gln-73, | | |
| | | | | | | Glu-88 to Glu-93, | | |
| | | | | | | Arg-156 to Gly-163, | | |
| | | | | | | Ala-199 to Gly-206, | | |
| | | | | | | Asp-216 to Ser-226, | | |
| | | | | | | Thr-249 to Asn-254, | | |
| | | | | | | Asp-339 to Pro-345, | | |
| | | | | | | Ile-370 to Gly-379, | | |
| | | | | | | Pro-429 to Glu-434, | | |
| | | | | | | Arg-461 to Pro-466, | | |
| | | | | | | Ala-475 to Thr-482, | | |
| | | | | | | Pro-585 to Gly-593, | | |
| | | | | | | Glu-631 to Gln-639, | | |
| | | | | | | Pro-674 to Pro-682, | | |
| | | | | | | Gln-715 to Gly-720, | | |
| | | | | | | Ser-736 to Arg-742. | | |
| 189 | HWLEV32 | 1032602 | 199 | 39-176 | 488 | | | |
| | HWLEV32 | 873296 | 295 | 29-166 | 584 | | | |
| | HWLEV32 | 881710 | 296 | 3-410 | 585 | | | |
| | HWLEV32 | 846351 | 297 | 1-423 | 586 | His-7 to Gly-15, | | |
| | | | | | | Pro-89 to Arg-95, | | |
| | | | | | | Pro-103 to His-109. | | |
| 190 | HYBAR01 | 610383 | 200 | 157-297 | 489 | | | |
| 191 | HYBBE75 | 834784 | 201 | 319-444 | 490 | Pro-34 to Trp-41. | | |
| 192 | HAPSA79 | 846517 | 202 | 468-1400 | 491 | Leu-3 to Arg-8, | | |
| | | | | | | Asp-57 to Arg-64, | | |
| | | | | | | Glu-66 to Thr-75, | | |
| | | | | | | Arg-120 to Ile-126, | | |
| | | | | | | Gln-161 to Asp-177, | | |
| | | | | | | Thr-182 to Ser-194, | | |
| | | | | | | Lys-211 to Gln-216, | | |
| | | | | | | Asn-274 to Gly-290, | | |
| | | | | | | Thr-296 to Phe-302. | | |
| | HAPSA79 | 887467 | 298 | 468-1400 | 587 | Leu-3 to Arg-8, | | |
| | | | | | | Asp-57 to Arg-64, | | |
| | | | | | | Glu-66 to Thr-75, | | |
| | | | | | | Arg-120 to Ile-126, | | |
| | | | | | | Gln-161 to Asp-177, | | |
| | | | | | | Thr-182 to Ser-194, | | |
| | | | | | | Lys-211 to Gln-216, | | |
| | | | | | | Asn-274 to Gly-290, | | |
| | | | | | | Thr-296 to Phe-302. | | |
| | HAPSA79 | 878627 | 299 | 468-1400 | 588 | Leu-3 to Arg-8, | | |
| | | | | | | Asp-57 to Arg-64, | | |
| | | | | | | Glu-66 to Thr-75, | | |
| | | | | | | Arg-120 to Ile-126, | | |
| | | | | | | Gln-161 to Asp-177, | | |
| | | | | | | Thr-182 to Ser-194, | | |
| | | | | | | Lys-211 to Gln-216, | | |
| | | | | | | Asn-274 to Gly-290, | | |
| | | | | | | Thr-296 to Phe-302. | | |

[0091] TABLE 1B.2

| | | | SEQ | |
|---|---|---|---|---|
| Gene | cDNA Clone | Contig | ID | Tissue Distribution Library Code: Count |
| No: | ID | ID: | NO: X | (see Table 4 for Library Codes) |
| 1 | H2MAC30 | 544957 | 11 | AR096: 11, AR039: 10, AR313: 10, AR299: 10, AR250: 9, AR240: 8, AR254: 8, AR055: 8, AR242: 8, AR060: 7, AR089: 7, AR162: 7, AR316: 6, AR161: 6, AR163: 6, |
| | | | | AR213: 6, AR269: 6, AR252: 5, AR268: 5, AR169: 5, AR200: 5, AR204: 5, AR215: 5, AR165: 5, AR053: 5, AR196: 5, AR166: 5, AR164: 5, AR199: 5, AR104: 5, AR282: 5, |
| | | | | AR176: 5, |
| | | | | AR266: 5, AR180: 4, AR264: 4, AR261: 4, AR277: 4, AR300: 4, AR229: 4, AR183: 4, AR181: 4, AR190: 4, AR173: 4, AR263: 4, AR247: 4, AR309: 4, AR197: 4, AR274: 4, |
| | | | | AR178: 4, AR214: 4, AR205: 4, AR212: 4, AR243: 4, AR312: 4, AR191: 4, AR253: 4, AR182: 4, AR236: 4, AR170: 4, AR245: 3, AR185: 3, AR272: 3, AR217: 3, AR171: 3, |
| | | | | AR267: 3, AR175: 3, AR308: 3, AR192: 3, AR290: 3, AR271: 3, AR193: 3, AR291: 3, AR219: 3, AR237: 3, AR233: 3, AR188: 3, AR201: 3, AR216: 3, AR311: 3, AR270: 3, |
| | | | | AR177: 3, AR174: 3, AR218: 3, AR234: 3, AR283: 3, AR179: 3, AR293: 3, AR207: 3, AR231: 3, AR221: 3, AR228: 3, AR203: 3, AR285: 3, AR262: 3, AR255: 2, AR224: 2, |
| | | | | AR288: 2, AR238: 2, AR195: 2, AR287: 2, AR257: 2, AR239: 2, AR168: 2, AR286: 2, AR189: 2, AR296: 2, AR230: 2, AR223: 2, AR275: 2, AR289: 2, AR297: 1, AR222: 1, |
| | | | | AR232: 1, AR033: 1, AR260: 1, AR061: 1, AR227: 1, AR295: 1, AR235: 1, AR294: 1, AR225: 1, AR258: 1, AR172: 1, AR226: 1, AR210: 1, AR211: 1, L0766: 16, L0743: 11, |
| | | | | H0692: 8, L0769: 7, L0518: 6, L0748: 6, L0771: 4, L0745: 4, L0779: 4, H0265: 3, S0358: 3, H0494: 3, L0755: 3, L3814: 2, H0550: 2, H0486: 2, H0581: 2, H0135: 2, L0761: 2, |
| | | | | L0804: 2, L0774: 2, L0438: 2, L0777: 2, H0685: 1, S0114: 1, H0583: 1, S0116: 1, S0212: 1, H0254: 1, S0408: 1, S0476: 1, H0772: 1, T0104: 1, H0586: 1, H0587: 1, H0331: 1, |
| | | | | T0109: 1, H0599: 1, L0738: 1, H0150: 1, H0012: 1, H0264: 1, S0438: 1, L0770: 1, L0374: 1, L0764: 1, L0768: 1, L0803: 1, L0653: 1, L0776: 1, L0788: 1, L0792: 1, L0663: 1, |
| | | | | S0428: 1, S0053: 1, S0216: 1, H0783: 1, L3811: 1, S0152: 1, H0522: 1, H0555: 1, S0432: 1, L0744: 1, L0751: 1, L0749: 1, L0756: 1, L0758: 1, S0436: 1, L0601: 1, H0543: 1, |
| | | | | H0423: 1, S0424: 1 and H0506: 1. |
| 2 | H6EDF66 | 520498 | 12 | AR176: 12, AR161: 12, AR162: 12, AR163: 12, AR266: 11, AR238: 10, AR165: 10, AR235: 10, AR164: 10, AR166: 10, AR232: 9, AR284: 9, AR267: 9, AR201: 9, AR226: 9, |
| | | | | AR191: 9, AR291: 9, AR269: 9, AR184: 9, AR268: 9, AR242: 9, AR183: 9, AR178: 8, AR181: 8, AR193: 8, AR289: 8, AR290: 8, AR182: 8, AR270: 8, AR233: 8, AR237: 8, |
| | | | | AR313: 8, AR247: 8, AR292: 8, AR196: 8, AR207: 7, AR231: 7, AR173: 7, AR096: 7, AR227: 7, AR228: 7, AR179: 7, AR257: 7, AR175: 7, AR261: 7, AR293: 7, AR229: 7, |
| | | | | AR315: 7, AR177: 7, AR298: 7, AR296: 7, AR197: 7, AR174: 7, AR236: 7, AR172: 7, AR285: 7, AR239: 7, AR287: 7, AR203: 6, AR245: 6, AR039: 6, AR190: 6, AR189: 6, |
| | | | | AR180: 6, AR195: 6, AR218: 6, AR281: 6, AR240: 6, AR249: 6, AR299: 6, AR264: 6, AR255: 6, AR288: 6, AR286: 6, AR294: 6, AR256: 5, AR295: 5, AR219: 5, AR262: 5, |
| | | | | AR230: 5, AR308: 5, AR234: 5, AR199: 5, AR248: 5, AR272: 5, AR250: 5, AR251: 5, AR297: 5, AR089: 5, AR200: 5, AR282: 5, AR185: 5, AR265: 5, AR259: 5, AR212: 5, |
| | | | | AR198: 5, AR316: 5, AR225: 5, AR215: 5, AR061: 5, AR258: 5, AR300: 5, AR224: 5, AR223: 5, AR280: 5, AR222: 5, AR217: 5, AR033: 4, AR055: 4, AR060: 4, AR260: 4, |
| | | | | AR310: 4, AR216: 4, AR252: 4, AR312: 4, AR309: 4, AR241: 4, AR246: 4, AR311: 4, AR192: 4, AR254: 3, AR314: 3, AR253: 3, AR277: 3, AR104: 3, AR221: 3, AR188: 3, |
| | | | | AR204: 3, AR274: 3, AR171: 3, AR283: 3, AR169: 3, AR271: 3, AR214: 3, AR275: 3, AR263: 3, AR243: 3, AR053: 2, AR186: 2, AR168: 2, AR052: 2, AR211: 2, AR205: 2, |
| | | | | AR213: 2, AR210: 2, AR170: 1 H0559: 1, H0427: 1, T0010: 1 and H0521: 1. |
| 3 | H6EDX46 | 1352262 | 13 | AR283: 18, AR104: 17, AR219: 16, AR218: 15, AR060: 13, AR055: 13, AR282: 13, AR277: 12, AR089: 11, AR316: 10, AR185: 10, |
| | | | | AR313: 9, AR096: 9, AR299: 9, AR300: 9, |
| | | | | AR240: 8, AR039: 6, H0657: 3, L0794: 3, H0559: 2, L0800: 2, L0375: 2, L0659: 2, L0809: 2, L0755: 2, L0731: 2, L0599: 2, H0170: 1, |
| | | | | H0656: 1, S0116: 1, H0306: 1, S0358: 1, |
| | | | | S0376: 1, H0722: 1, H0443: 1, H0497: 1, H0485: 1, T0109: 1, H0575: 1, H0251: 1, S0312: 1, S0314: 1, H0252: 1, H0264: 1, H0488: 1, |
| | | | | H0413: 1, T0041: 1, H0560: 1, H0647: 1, |
| | | | | H0646: 1, S0422: 1, L0763: 1, L0770: 1, L0769: 1, L0638: 1, L0764: 1, L0363: 1, L0804: 1, L0655: 1, L0542: 1, L0792: 1, L0666: 1, L0665: 1, L3811: 1, H0547: 1, H0690: 1, |
| | | | | H0682: 1, H0658: 1, H0670: 1, H0648: 1, H0696: 1, S0392: 1, L0439: 1, S0436: 1, L0605: 1, L0591: 1, S0276: 1, H0543: 1 and H0423: 1. |
| | H6EDX46 | 637786 | 203 | |
| 4 | HABAG37 | 637942 | 14 | AR313: 22, AR161: 16, AR162: 16, AR165: 16, AR163: 16, AR166: 16, AR173: 16, AR164: 16, AR178: 15, AR196: 14, AR089: 14, AR212: 14, AR235: 14, AR229: 13, |
| | | | | AR293: 13, AR258: 13, AR299: 13, AR096: 13, AR199: 12, AR247: 12, AR261: 12, AR234: 12, AR275: 12, AR264: 12, AR207: 12, AR300: 12, AR226: 12, AR285: 12, |
| | | | | AR183: 12, AR053: 12, AR177: 12, AR175: 12, AR294: 11, AR295: 11, AR240: 11, AR233: 11, AR203: 11, AR174: 11, AR262: 11, AR236: 11, AR060: 11, AR242: 11, |
| | | | | AR312: 11, AR192: 10, AR257: 10, AR218: 10, AR180: 10, AR263: 10, AR195: 10, AR198: 10, AR296: 10, AR185: 10, AR200: 10, AR297: 10, AR191: 10, AR238: 10, |
| | | | | AR227: 10, AR239: 10, AR316: 10, AR309: 9, AR228: 9, AR181: 9, AR286: 9, AR308: 9, AR179: 9, AR182: 9, AR288: 9, AR213: 9, |
| | | | | AR055: 9, AR287: 9, AR189: 8, AR224: 8, |
| | | | | AR282: 8, AR231: 8, AR168: 8, AR270: 8, AR311: 8, AR252: 8, AR104: 8, AR193: 8, AR188: 8, AR039: 8, AR274: 8, AR219: 8, AR215: 8, AR225: 7, AR204: 7, AR176: 7, |
| | | | | AR223: 7, AR033: 7, AR197: 7, AR230: 7, AR245: 7, AR255: 7, AR268: 7, AR260: 7, AR269: 7, AR214: 7, AR267: 7, AR277: 7, AR250: 7, AR232: 7, AR271: 6, AR272: 6, |
| | | | | AR171: 6, AR190: 6, AR205: 6, AR172: 6, AR254: 6, AR283: 6, AR237: 6, AR210: 6, AR253: 5, AR291: 5, AR216: 5, AR201: 5, AR290: 5, AR211: 5, AR246: 5, AR217: 5, |
| | | | | AR222: 5, AR289: 5, AR221: 5, AR266: 4, AR256: 4, AR170: 4, AR061: 4, AR243: 4, AR169: 4, H0521: 4, L0803: 3, H0556: 2, S0142: 2, L0761: 2, L0741: 2, L0777: 2, |
| | | | | S0444: 1, L0717: 1, S0278: 1, H0333: 1, H0635: 1, H0253: 1, H0505: 1, H0434: 1, H0078: 1, S0344: 1, S0426: 1, L0769: 1, L5575: 1, L0800: 1, L0768: 1, L0794: 1, L0774: 1, |
| | | | | L0509: 1, L0789: 1, L0663: 1, L0740: 1, L0754: 1, L0779: 1, L0731: 1 and L0759: 1. |
| 5 | HACBD91 | 637482 | 15 | AR055: 116, AR283: 103, AR060: 91, AR089: 55, AR235: 53, AR299: 52, AR185: 51, AR104: 49, AR096: 34, AR039: 30, AR282: 30, AR316: 29, AR261: 29, AR196: 24, |
| | | | | AR218: 23, AR219: 21, AR272: 20, AR300: 20, AR313: 19, AR277: 19, AR240: 19, AR309: 17, AR236: 17, AR295: 16, AR252: 15, AR271: 15, AR191: 15, AR285: 14, |
| | | | | AR246: 13, AR165: 13, AR291: 13, AR264: 13, AR311: 13, AR164: 13, AR166: 13, AR308: 12, AR275: 12, AR174: 12, AR287: 11, AR263: 11, AR286: 11, AR177: 11, |
| | | | | AR161: 10, AR162: 10, AR200: 10, AR201: 10, AR163: 10, AR195: 10, AR262: 10, AR188: 10, AR207: 10, AR288: 10, AR267: 10, |
| | | | | AR197: 9, AR181: 9, AR266: 9, AR312: 9, |
| | | | | AR227: 9, AR257: 9, AR175: 9, AR289: 9, AR232: 9, AR189: 8, AR297: 8, AR053: 8, AR033: 8, AR190: 8, AR245: 8, AR296: 8, AR193: 8, AR258: 8, AR255: 8, AR239: 7, |
| | | | | AR260: 7, AR173: 7, AR198: 7, AR293: 7, AR199: 7, AR250: 7, AR243: 6, AR247: 6, AR274: 6, AR211: 6, AR205: 6, AR203: 6, AR213: 6, AR178: 6, AR226: 5, AR256: 5, |
| | | | | AR231: 5, AR294: 5, AR270: 5, AR204: 5, AR176: 5, AR238: 5, AR210: 5, AR230: 4, AR237: 4, AR253: 4, AR170: 4, AR212: 4, AR061: 4, AR183: 4, AR242: 4, AR254: 3, |
| | | | | AR169: 3, AR182: 3, AR290: 3, AR268: 3, AR179: 3, AR217: 3, AR221: 2, AR216: 2, AR168: 2, AR224: 2, AR229: 2, AR214: 2, AR223: 1, AR228: 1, AR172: 1, AR192: 1, |
| | | | | L0748: 8, L0439: 4, L0749: 3, H0171: 2, L3659: 2, L0438: 2, S6024: 1, S0360: 1, H0640: 1, S0278: 1, L3655: 1, S0280: 1, H0012: 1, L0055: 1, H0032: 1, H0647: 1, L0807: 1, |
| | | | | L0665: 1, H0659: 1, L0355: 1, S0328: 1, H0754: 1, H0710: 1, L0756: 1, L0780: 1, L0759: 1, S0260: 1, S0452: 1 and H0721: 1. |
| 6 | HACCI17 | 891114 | 16 | AR251: 15, AR310: 9, AR273: 8, AR265: 7, AR248: 6, AR241: 5, AR052: 5, AR312: 5, AR274: 5, AR215: 5, AR313: 4, AR263: 4, AR309: 4, AR170: 4, AR243: 4, AR235: 4, |
| | | | | AR053: 4, AR213: 4, AR249: 3, AR271: 3, AR184: 3, AR206: 3, AR198: 3, AR292: 3, AR282: 3, AR266: 3, AR284: 3, AR186: 3, AR247: 3, AR219: 2, AR240: 2, AR172: 2, |
| | | | | AR175: 2, AR269: 2, AR182: 2, AR225: 2, AR183: 2, AR253: 2, AR238: 2, AR218: 2, AR242: 2, AR096: 2, AR089: 2, AR177: 2, AR286: 2, AR161: 2, AR277: 2, AR259: 2, |
| | | | | AR033: 2, AR299: 2, AR060: 1, AR245: 1, AR291: 1, AR290: 1, AR293: 1, AR300: 1, AR285: 1, AR311: 1, AR171: 1, AR185: 1, AR270: 1, AR178: 1, AR217: 1, AR268: 1, |
| | | | | AR061: 1, AR294: 1, AR295: 1, AR256: 1, AR237: 1, AR193: 1, AR257: 1, AR289: 1, AR275: 1, AR296: 1, AR199: 1, AR283: 1, L0809: 11, L0794: 10, L0770: 9, S0474: 5, |
| | | | | L0777: 5, H0739: 4, H0717: 4, H0575: 4, H0623: 4, L0769: 4, L0731: 4, L0803: 3, L0806: 3, L0789: 3, L0747: 3, S6026: 2, S0222: 2, H0586: 2, H0013: 2, H0599: 2, S0049: 2, |
| | | | | H0052: 2, S0051: 2, S0036: 2, L3904: 2, L5575: 2, L3905: 2, L0774: 2, L0805: 2, L0710: 2, H0539: 2, L0743: 2, L0439: 2, L0756: 2, L0779: 2, L0780: 2, H0624: 1, H0171: 1, |
| | | | | S0046: 1, H0587: 1, H0486: 1, S0280: 1, H0036: 1, H0253: 1, H0309: 1, H0123: 1, H0375: 1, S6028: 1, H0687: 1, H0424: 1, H0708: 1, |
| | | | | H0163: 1, H0063: 1, H0743: 1, L5565: 1, |
| | | | | L0800: 1, L0783: 1, L5622: 1, L0665: 1, S0216: 1, H0693: 1, L0438: 1, H0520: 1, H0593: 1, S0378: 1, S0044: 1, H0555: 1, S0037: 1, L0742: 1, L0748: 1, L0749: 1, L0750: 1, |
| | | | | L0758: 1, L0759: 1, S0260: 1 and L0599: 1. |
| | HACCI17 | 731877 | 204 | |
| 7 | HAGAM64 | 626997 | 17 | AR169: 7, AR170: 4, AR171: 3, AR168: 2, AR180: 2, AR183: 2, AR188: 2, AR257: 2, AR311: 1, AR264: 1, AR178: 1, AR261: 1, AR313: 1, AR308: 1, AR243: 1, AR225: 1, |
| | | | | AR235: 1, AR196: 1, AR282: 1, AR255: 1, AR096: 1, AR269: 1, AR277: 1, S0030: 1, S0010: 1 and L0369: 1. |
| 8 | HAHDR32 | 635357 | 18 | AR055: 27, AR235: 20, AR283: 12, AR236: 10, AR266: 9, AR261: 9, AR161: 9, AR162: 9, AR163: 8, AR176: 8, AR293: 8, |
| | | | | AR256: 7, AR197: 6, AR089: 6, AR295: 6, AR180: 6, |
| | | | | AR294: 6, AR262: 6, AR204: 6, AR289: 6, AR165: 6, AR182: 6, AR296: 6, AR285: 6, AR164: 5, AR166: 5, AR060: 5, AR291: 5, AR181: 5, AR239: 5, AR250: 5, AR297: 5, |
| | | | | AR268: 5, AR257: 5, AR229: 5, AR267: 5, AR309: 5, AR183: 5, AR260: 5, AR228: 5, AR237: 5, AR272: 5, AR178: 5, AR201: 4, AR214: 4, AR193: 4, AR299: 4, AR053: 4, |
| | | | | AR253: 4, AR223: 4, AR233: 4, AR271: 4, AR316: 4, AR269: 4, AR287: 4, AR169: 4, AR224: 4, AR252: 4, AR104: 4, AR177: 4, AR270: 4, AR039: 4, AR179: 4, AR255: 4, |
| | | | | AR238: 4, AR226: 3, AR196: 3, AR274: 3, AR175: 3, AR264: 3, AR207: 3, AR300: 3, AR185: 3, AR230: 3, AR203: 3, AR168: 3, AR240: 3, AR231: 3, AR198: 3, AR247: 3, |
| | | | | AR234: 3, AR061: 3, AR258: 3, AR282: 3, AR245: 3, AR174: 3, AR254: 3, AR243: 3, AR096: 3, AR313: 3, AR286: 3, AR311: 3, AR199: 3, AR227: 3, AR312: 3, AR232: 2, |
| | | | | AR210: 2, AR290: 2, AR288: 2, AR219: 2, AR200: 2, AR246: 2, AR221: 2, AR171: 2, AR275: 2, AR188: 2, AR191: 2, AR216: 2, AR218: 2, AR190: 2, AR189: 2, AR263: 2, |
| | | | | AR212: 2, AR172: 2, AR033: 2, AR205: 2, AR211: 1, AR277: 1, AR217: 1, AR173: 1, AR195: 1, L0471: 7, L0750: 6, H0599: 4, H0373: 2, L0163: 2, L0761: 2, L0748: 2, |
| | | | | H0735: 1, H0619: 1, H0002: 1, S0010: 1, H0050: 1, H0477: 1, L0770: 1, L0372: 1, L0662: 1, L0526: 1, L0663: 1, L0747: 1, L0755: 1, L0731: 1, L0584: 1 and H0506: 1. |
| 9 | HAIBO71 | 490848 | 19 | AR253: 6, AR263: 4, AR309: 4, AR252: 4, AR228: 4, AR195: 4, AR243: 3, AR169: 3, AR261: 3, AR311: 3, AR254: 3, AR226: 3, AR219: 3, AR213: 3, AR218: 3, AR205: 3, |
| | | | | AR264: 3, AR233: 3, AR297: 3, AR296: 3, AR165: 3, AR288: 3, AR291: 3, AR163: 3, AR275: 3, AR161: 3, AR217: 3, AR166: 3, AR197: 3, AR250: 3, AR055: 3, AR282: 3, |
| | | | | AR236: 3, AR162: 3, AR060: 3, AR164: 3, AR239: 3, AR168: 2, AR207: 2, AR290: 2, AR175: 2, AR293: 2, AR196: 2, AR268: 2, AR271: 2, AR269: 2, AR215: 2, AR189: 2, |
| | | | | AR201: 2, AR266: 2, AR185: 2, AR033: 2, AR183: 2, AR214: 2, AR212: 2, AR191: 2, AR274: 2, AR289: 2, AR270: 2, AR223: 2, AR177: 2, AR287: 2, AR257: 2, AR272: 2, |
| | | | | AR316: 2, AR178: 2, AR295: 2, AR173: 2, AR199: 2, AR277: 2, AR238: 2, AR286: 2, AR312: 2, AR255: 2, AR267: 2, AR229: 1, AR179: 1, AR200: 1, AR231: 1, AR089: 1, |
| | | | | AR096: 1, AR176: 1, AR262: 1, AR313: 1, AR240: 1, AR258: 1, AR285: 1, AR237: 1, AR193: 1, AR230: 1, AR039: 1, AR190: 1, AR299: 1, AR260: 1, AR104: 1, AR188: 1, |
| | | | | AR300: 1, AR225: 1, AR283: 1, AR232: 1, AR308: 1, H0657: 1, S0212: 1, S0360: 1, S0132: 1, H0628: 1, L0766: 1, L0803: 1, L0776: 1, H0539: 1, L0731: 1 and H0422: 1. |
| 10 | HAJAF57 | 823516 | 20 | AR254: 4, AR171: 3, AR207: 3, AR170: 3, AR169: 3, AR053: 3, AR213: 2, AR225: 2, AR271: 2, AR165: 2, AR198: 2, AR201: 2, AR166: 2, AR176: 2, AR264: 2, AR282: 2, |
| | | | | AR272: 2, AR089: 2, AR297: 2, AR288: 2, AR257: 2, AR188: 2, AR224: 2, AR175: 1, AR163: 1, AR283: 1, AR196: 1, AR162: 1, AR246: 1, AR308: 1, AR226: 1, AR161: 1, |
| | | | | AR193: 1, AR164: 1, AR183: 1, AR285: 1, AR173: 1, AR286: 1, AR255: 1, H0561: 1 |
| 11 | HAMFC93 | 904749 | 21 | AR316: 210, AR089: 205, AR313: 203, AR205: 188, AR096: 145, AR299: 140, AR219: 119, AR245: 111, AR185: 109, AR252: 108, AR218: 107, AR039: 106, AR274: 101, |
| | | | | AR246: 96, AR055: 91, AR195: 89, AR283: 88, AR272: 88, AR271: 83, AR212: 83, AR214: 80, AR254: 77, AR053: 77, AR197: 75, AR213: 73, AR204: 72, AR216: 72, |
| | | | | AR201: 72, AR243: 68, AR282: 67, AR222: 66, AR312: 66, AR242: 63, AR060: 62, AR277: 62, AR165: 62, AR308: 61, AR193: 60, AR198: 60, AR309: 59, AR164: 59, |
| | | | | AR300: 59, AR104: 57, AR311: 57, AR223: 57, AR162: 56, AR161: 56, AR250: 54, AR166: 54, AR163: 54, AR192: 54, AR217: 53, AR253: 51, AR264: 50, AR263: 49, |
| | | | | AR169: 49, AR240: 44, AR224: 41, AR247: 39, AR275: 39, AR171: 35, AR168: 34, AR179: 31, AR207: 31, AR174: 30, AR172: 30, AR225: 30, AR210: 28, AR236: 27, |
| | | | | AR177: 26, AR189: 26, AR291: 26, AR178: 25, AR180: 24, AR288: 24, AR211: 24, AR183: 23, AR296: 22, AR230: 22, AR061: 22, AR033: 22, AR173: 22, AR175: 21, |
| | | | | AR170: 21, AR295: 21, AR297: 21, AR268: 21, AR269: 21, AR293: 21, AR266: 21, AR290: 20, AR270: 20, AR181: 20, AR267: 20, AR237: 20, AR231: 20, AR289: 19, |
| | | | | AR229: 17, AR285: 17, AR238: 17, AR176: 17, AR215: 16, AR221: 16, AR234: 16, AR190: 15, AR226: 15, AR233: 15, AR182: 14, AR286: 14, AR235: 14, AR239: 14, |
| | | | | AR287: 14, AR232: 14, AR227: 13, AR294: 13, AR255: 13, AR256: 13, AR228: 13, AR199: 12, AR261: 11, AR257: 10, AR258: 10, AR262: 10, |
| | | | | AR188: 9, AR260: 8, AR200: 6, |
| | | | | AR203: 6, AR191: 5, AR196: 4, L0439: 20, L0438: 14, L0803: 9, L0754: 6, L0770: 5, L0747: 5, L0777: 5, H0622: 4, L0740: 4, L3643: 3, |
| | | | | H0551: 3, L0749: 3, L0755: 3, H0624: 2, |
| | | | | H0485: 2, H0013: 2, H0052: 2, L0651: 2, L0378: 2, S0374: 2, L0743: 2, L0752: 2, L0759: 2, H0423: 2, H0171: 1, H0556: 1, S0442: 1, S0376: 1, S0360: 1, H0722: 1, H0733: 1, |
| | | | | S0222: 1, H0497: 1, H0574: 1, H0069: 1, H0427: 1, L0021: 1, S0010: 1, S0346: 1, H0596: 1, H0046: 1, H0562: 1, H0569: 1, L0471: 1, L0163: 1, H0510: 1, H0179: 1, S0250: 1, |
| | | | | L0483: 1, H0616: 1, H0413: 1, H0494: 1, S0014: 1, H0560: 1, S0438: 1, S0150: 1, H0641: 1, H0646: 1, S0142: 1, S0422: 1, L0520: 1, L0769: 1, L0667: 1, L0662: 1, L0794: 1, |
| | | | | L0766: 1, L0649: 1, L0804: 1, L0774: 1, L0775: 1, L0655: 1, L0659: 1, L0809: 1, L0664: 1, H0703: 1, L3825: 1, S0126: 1, H0435: 1, H0659: 1, H0670: 1, S0328: 1, S0378: 1, |
| | | | | H0696: 1, S0406: 1, S0028: 1, L0751: 1, L0756: 1, L0780: 1, L0731: 1 and L0758: 1. |
| | HAMFC93 | 900586 | 205 | |
| | HAMFC93 | 906819 | 206 | |
| 12 | HAPNY86 | 587261 | 22 | AR241: 9, AR268: 8, AR186: 8, AR176: 8, AR270: 7, AR197: 7, AR183: 7, AR175: 7, AR269: 7, AR254: 7, AR221: 6, AR182: 6, AR274: 6, AR252: 6, AR204: 6, AR206: 6, |
| | | | | AR181: 6, AR184: 6, AR267: 6, AR246: 6, AR290: 6, AR201: 6, AR309: 6, AR266: 6, AR228: 5, AR198: 5, AR178: 5, AR207: 5, AR165: 5, AR163: 5, AR161: 5, AR162: 5, |
| | | | | AR171: 5, AR273: 5, AR164: 5, AR250: 5, AR061: 5, AR238: 5, AR166: 5, AR289: 5, AR202: 5, AR055: 5, AR214: 5, AR298: 5, AR195: 5, AR052: 5, AR205: 5, AR192: 4, |
| | | | | AR243: 4, AR291: 4, AR236: 4, AR271: 4, AR053: 4, AR282: 4, AR312: 4, AR257: 4, AR293: 4, AR284: 4, AR229: 4, AR226: 4, AR261: 4, AR296: 4, AR177: 4, AR216: 4, |
| | | | | AR275: 4, AR185: 4, AR233: 4, AR193: 4, AR247: 4, AR264: 4, AR237: 4, AR227: 4, AR235: 4, AR292: 4, AR245: 4, AR295: 4, AR239: 4, AR232: 3, AR230: 3, AR299: 3, |
| | | | | AR213: 3, AR300: 3, AR287: 3, AR174: 3, AR231: 3, AR194: 3, AR191: 3, AR212: 3, AR313: 3, AR262: 3, AR223: 3, AR286: 3, AR255: 3, AR297: 3, AR288: 3, AR217: 3, |
| | | | | AR033: 3, AR089: 3, AR294: 3, AR272: 3, AR173: 3, AR060: 3, AR311: 3, AR285: 3, AR308: 3, AR234: 3, AR179: 3, AR203: 3, AR169: 3, AR190: 3, AR172: 2, AR316: 2, |
| | | | | AR256: 2, AR259: 2, AR199: 2, AR277: 2, AR200: 2, AR222: 2, AR189: 2, AR253: 2, AR168: 2, AR188: 2, AR210: 2, AR265: 2, AR283: 2, AR240: 2, AR244: 2, AR224: 2, |
| | | | | AR225: 2, AR104: 2, AR039: 2, AR249: 2, AR218: 2, AR096: 2, AR219: 2, AR196: 2, AR258: 2, AR310: 2, AR180: 1, AR170: 1, AR314: 1, H0575: 7, L0756: 5, S0360: 3, |
| | | | | L0779: 3, L0599: 3, H0624: 2, H0662: 2, L0663: 2, H0521: 2, L0759: 2, H0170: 1, H0208: 1, H0486: 1, H0599: 1, H0024: 1, S0003: 1, |
| | | | | H0039: 1, H0163: 1, H0040: 1, H0413: 1, |
| | | | | H0131: 1, L0763: 1, L0638: 1, L0646: 1, L0648: 1, L0662: 1, L0768: 1, L0655: 1, L0809: 1, H0144: 1, L0744: 1, L0750: 1 and H0506: 1. |
| 13 | HATDF29 | 845965 | 23 | AR290: 4, AR221: 3, AR170: 3, AR253: 3, AR169: 3, AR213: 3, AR178: 3, AR243: 3, AR215: 3, AR162: 2, AR180: 2, AR270: 2, AR177: 2, AR053: 2, AR289: 2, AR309: 2, |
| | | | | AR171: 2, AR240: 2, AR224: 2, AR176: 2, AR232: 2, AR277: 2, AR181: 1, AR161: 1, AR163: 1, AR237: 1, AR264: 1, AR282: 1, AR217: 1, AR291: 1, AR272: 1, AR172: 1, |
| | | | | AR268: 1, AR104: 1, AR296: 1, AR096: 1, AR257: 1, AR283: 1, S0132: 3, H0575: 3, H0271: 3, H0038: 3, S0142: 3, H0521: 3, |
| | | | | L0758: 3, L0596: 3, S0344: 2, H0661: 1, H0402: 1, |
| | | | | S0360: 1, H0393: 1, H0618: 1, H0253: 1, H0581: 1, H0179: 1, T0023: 1, T10041: 1, H0494: 1, S0002: 1, L0763: 1, L0775: 1, S0374: 1, H0555: 1, L0751: 1 and L0589: 1. |
| 14 | HBAFJ33 | 625916 | 24 | AR104: 19, AR311: 14, AR096: 12, AR285: 12, AR291: 12, AR295: 11, AR185: 11, AR161: 11, AR162: 11, AR163: 11, AR089: 11, AR190: 10, AR275: 10, AR316: 10, |
| | | | | AR312: 9, AR189: 9, AR274: 9, AR308: 9, AR219: 9, AR196: 9, AR297: 9, AR262: 9, AR055: 9, AR165: 9, AR287: 9, AR033: 8, AR164: 8, AR309: 8, AR174: 8, AR313: 8, |
| | | | | AR255: 8, AR240: 8, AR283: 8, AR263: 8, AR218: 8, AR264: 8, AR288: 8, AR235: 8, AR252: 8, AR210: 8, AR236: 8, AR191: 7, AR166: 7, AR299: 7, AR200: 7, AR177: 7, |
| | | | | AR170: 7, AR261: 7, AR168: 7, AR258: 7, AR212: 7, AR221: 7, AR293: 6, AR224: 6, AR188: 6, AR296: 6, AR282: 6, AR247: 6, AR169: 6, AR175: 6, AR286: 6, AR272: 6, |
| | | | | AR223: 6, AR277: 6, AR178: 6, AR060: 6, AR172: 6, AR183: 6, AR171: 6, AR289: 6, AR039: 5, AR214: 5, AR179: 5, AR222: 5, AR294: 5, AR213: 5, AR216: 5, AR290: 5, |
| | | | | AR215: 5, AR269: 5, AR180: 5, AR173: 5, AR176: 5, AR211: 5, AR270: 5, AR257: 5, AR300: 5, AR181: 5, AR225: 4, AR217: 4, AR268: 4, AR199: 4, AR207: 4, AR053: 4, |
| | | | | AR238: 4, AR246: 4, AR182: 4, AR260: 3, AR271: 3, AR231: 3, AR203: 3, AR256: 3, AR226: 3, AR234: 3, AR205: 3, AR193: 3, AR195: 3, AR242: 3, AR237: 3, AR232: 3, |
| | | | | AR267: 3, AR266: 3, AR245: 3, AR243: 3, AR201: 2, AR192: 2, AR229: 2, AR228: 2, AR239: 2, AR230: 2, AR061: 2, AR197: 2, AR250: 2, AR227: 2, AR233: 2, AR254: 1, |
| | | | | AR253: 1, L0770: 6, L0748: 6, L0779: 5, L0731: 5, L0766: 4, L0659: 4, L0752: 4, L0769: 3, L0664: 3, L0439: 3, L0747: 3, L0757: 3, L0005: 2, H0427: 2, L0738: 2, L0157: 2, |
| | | | | T0010: 2, T0006: 2, L0499: 2, L0775: 2, L0806: 2, L0809: 2, L0438: 2, H0651: 2, L0751: 2, L0756: 2, L0777: 2, L0755: 2, L0596: 2, H0650: 1, S0356: 1, S0360: 1, H0741: 1, |
| | | | | H0411: 1, H0455: 1, H0574: 1, H0156: 1, H0581: 1, H0309: 1, H0544: 1, H0023: 1, H0071: 1, H0083: 1, T0004: 1, T0042: 1, |
| | | | | L0520: 1, L0761: 1, L0772: 1, L0771: 1, L0773: 1, |
| | | | | L0648: 1, L0662: 1, L0768: 1, L0774: 1, L0375: 1, L0784: 1, L0512: 1, L0783: 1, L0666: 1, L0665: 1, L0565: 1, H0659: 1, S0378: 1, H0696: 1, S0406: 1, H0436: 1, L0740: 1, |
| | | | | L0749: 1, L0758: 1, L0759: 1, S0260: 1, H0444: 1, H0445: 1, L0589: 1, L0591: 1, L0581: 1, L0595: 1, H0423: 1 and H0422: 1. |
| 15 | HBAFV19 | 843036 | 25 | AR196: 41, AR173: 39, AR164: 35, AR166: 32, AR165: 31, AR262: 30, AR162: 25, AR161: 25, AR163: 24, AR174: 24, AR178: 23, AR236: 22, AR199: 22, AR264: 21, |
| | | | | AR257: 21, AR181: 21, AR313: 20, AR212: 20, AR242: 20, AR180: 20, AR258: 19, AR200: 18, AR308: 18, AR261: 18, AR230: 18, AR175: 17, AR287: 17, AR234: 17, |
| | | | | AR191: 16, AR235: 16, AR247: 16, AR240: 16, AR297: 16, AR229: 15, AR188: 15, AR260: 15, AR203: 15, AR179: 15, AR189: 15, AR207: 15, AR053: 15, AR177: 14, |
| | | | | AR183: 13, AR255: 13, AR238: 13, AR288: 13, AR192: 12, AR296: 12, AR300: 12, AR233: 12, AR214: 11, AR263: 11, AR223: 11, AR311: 11, AR281: 11, AR169: 11, |
| | | | | AR224: 11, AR195: 11, AR213: 10, AR228: 10, AR222: 10, AR280: 10, AR211: 10, AR275: 10, AR269: 10, AR185: 10, AR314: 10, AR193: 10, AR239: 10, AR089: 10, |
| | | | | AR182: 10, AR218: 10, AR293: 10, AR168: 9, AR312: 9, AR285: 9, AR176: 9, AR217: 9, AR171: 9, AR299: 9, AR226: 9, AR270: 9, |
| | | | | AR221: 9, AR295: 9, AR215: 9, AR315: 9, |
| | | | | AR170: 9, AR219: 8, AR294: 8, AR033: 8, AR190: 8, AR210: 8, AR286: 8, AR274: 8, AR197: 8, AR231: 8, AR172: 8, AR290: 8, AR096: 8, AR268: 7, AR267: 7, AR316: 7, |
| | | | | AR237: 7, AR277: 7, AR252: 7, AR291: 7, AR216: 7, AR282: 7, AR309: 7, AR201: 6, AR198: 6, AR245: 6, AR225: 6, AR272: 6, AR256: 6, AR202: 6, AR184: 5, AR060: 5, |
| | | | | AR227: 5, AR250: 5, AR266: 5, AR232: 5, AR246: 5, AR289: 4, AR271: 4, AR273: 4, AR205: 4, AR310: 4, AR204: 4, AR254: 4, AR039: 4, AR265: 4, AR052: 3, AR243: 3, |
| | | | | AR249: 3, AR241: 3, AR186: 3, AR055: 3, AR104: 3, AR061: 2, AR284: 2, AR298: 2, AR206: 2, AR292: 2, AR283: 2, AR194: 1, AR259: 1, L0803: 2, L0665: 2, H0716: 1, |
| | | | | S0360: 1, H0742: 1, H0393: 1, H0411: 1, S0278: 1, T0071: 1, H0644: 1, H0617: 1, S0036: 1, S0440: 1, L0764: 1, L0794: 1, L0649: 1, L0526: 1, L0791: 1, L0663: 1, L0749: 1, |
| | | | | L0757: 1 and H0506: 1. |
| 16 | HBIBW67 | 553678 | 26 | AR313: 35, AR039: 25, AR165: 18, AR096: 18, AR164: 17, AR166: 17, AR089: 15, AR299: 12, AR300: 12, AR173: 12, AR247: 10, |
| | | | | AR316: 9, AR185: 9, AR104: 9, AR277: 9, |
| | | | | AR269: 8, AR060: 8, AR312: 8, AR257: 8, AR242: 8, AR183: 8, AR175: 8, AR240: 7, AR219: 7, AR229: 7, AR191: 7, AR196: 7, AR282: 7, AR238: 7, AR262: 7, AR309: 6, |
| | | | | AR182: 6, AR179: 6, AR258: 6, AR218: 6, AR180: 6, AR199: 6, AR270: 6, AR234: 5, AR181: 5, AR213: 5, AR174: 5, AR193: 5, AR233: 5, AR226: 5, AR053: 5, AR178: 5, |
| | | | | AR268: 5, AR200: 5, AR250: 5, AR308: 5, AR055: 5, AR204: 5, AR255: 5, AR254: 5, AR163: 5, AR189: 5, AR176: 5, AR236: 4, AR293: 4, AR237: 4, AR161: 4, AR201: 4, |
| | | | | AR197: 4, AR283: 4, AR231: 4, AR162: 4, AR266: 4, AR177: 4, AR228: 4, AR198: 4, AR192: 4, AR224: 4, AR207: 4, AR243: 3, AR203: 3, AR271: 3, AR267: 3, AR290: 3, |
| | | | | AR188: 3, AR221: 3, AR297: 3, AR235: 3, AR287: 3, AR190: 3, AR285: 3, AR169: 3, AR212: 3, AR294: 3, AR239: 3, AR261: 3, AR033: 3, AR205: 3, AR230: 3, AR291: 3, |
| | | | | AR296: 3, AR260: 3, AR168: 3, AR246: 3, AR227: 2, AR225: 2, AR295: 2, AR232: 2, AR286: 2, AR288: 2, AR264: 2, AR061: 2, AR195: 2, AR274: 2, AR256: 2, AR272: 2, |
| | | | | AR172: 2, AR275: 2, AR217: 2, AR211: 2, AR171: 1, AR222: 1, AR289: 1, AR216: 1, H0394: 2, S0376: 1, S0049: 1, L0794: 1 and T0068: 1. |
| 17 | HBIMB51 | 963208 | 27 | AR225: 5, AR162: 5, AR161: 5, AR223: 5, AR224: 5, AR170: 5, AR180: 5, AR176: 4, AR183: 4, AR214: 4, AR163: 4, AR165: 4, AR222: 4, AR164: 4, AR207: 4, AR166: 4, |
| | | | | AR228: 4, AR230: 3, AR291: 3, AR169: 3, AR287: 3, AR192: 3, AR269: 3, AR239: 3, AR264: 3, AR215: 3, AR238: 3, AR178: 3, AR282: 3, AR272: 3, AR201: 3, AR190: 3, |
| | | | | AR250: 3, AR173: 3, AR297: 3, AR234: 3, AR267: 3, AR257: 3, AR197: 3, AR168: 3, AR288: 3, AR181: 3, AR263: 3, AR245: 3, AR195: 2, AR188: 2, AR193: 2, AR262: 2, |
| | | | | AR179: 2, AR182: 2, AR268: 2, AR216: 2, AR172: 2, AR255: 2, AR236: 2, AR231: 2, AR253: 2, AR247: 2, AR296: 2, AR277: 2, AR266: 2, AR229: 2, AR290: 2, AR174: 2, |
| | | | | AR295: 2, AR233: 2, AR289: 2, AR270: 2, AR312: 2, AR227: 2, AR203: 2, AR089: 2, AR240: 2, AR175: 2, AR212: 2, AR294: 2, AR237: 2, AR293: 2, AR274: 2, AR254: 2, |
| | | | | AR226: 2, AR171: 2, AR189: 2, AR285: 2, AR309: 2, AR313: 2, AR271: 2, AR232: 2, AR286: 2, AR061: 2, AR300: 2, AR060: 2, AR273: 2, AR196: 2, AR242: 2, AR096: 2, |
| | | | | AR217: 2, AR177: 2, AR246: 2, AR316: 2, AR211: 2, AR185: 2, AR298: 2, AR311: 1, AR213: 1, AR205: 1, AR260: 1, AR039: 1, AR275: 1, AR052: 1, AR299: 1, AR258: 1, |
| | | | | AR199: 1, AR261: 1, AR308: 1, AR292: 1, AR186: 1, AR235: 1, AR191: 1, AR256: 1, AR200: 1, AR055: 1, AR204: 1, AR283: 1, AR104: 1, L0790: 1, H0593: 1 and S0152: 1. |
| | HBIMB51 | 672711 | 207 | |
| 18 | HBJID05 | 1130660 | 28 | AR192: 7, AR161: 4, AR162: 4, AR163: 4, AR193: 4, AR165: 4, AR308: 4, AR309: 4, AR312: 4, AR164: 4, AR282: 4, AR166: 4, AR195: 3, AR053: 3, AR245: 3, AR250: 3, |
| | | | | AR170: 3, AR215: 3, AR264: 3, AR311: 3, AR176: 3, AR201: 2, AR274: 2, AR275: 2, AR246: 2, AR197: 2, AR213: 2, AR313: 2, AR287: 2, AR212: 2, AR172: 2, AR272: 2, |
| | | | | AR225: 2, AR205: 2, AR296: 2, AR243: 2, AR033: 2, AR267: 2, AR089: 2, AR233: 2, AR299: 2, AR239: 2, AR173: 2, AR289: 2, AR257: 2, AR291: 2, AR182: 2, AR300: 1, |
| | | | | AR185: 1, AR177: 1, AR262: 1, AR293: 1, AR169: 1, AR247: 1, AR227: 1, AR060: 1, AR268: 1, AR061: 1, AR175: 1, AR191: 1, AR211: 1, AR297: 1, H0318: 1 |
| | HBJID05 | 544980 | 208 | |
| 19 | HBJJU28 | 561723 | 29 | AR161: 16, AR162: 16, AR163: 16, AR242: 12, AR313: 12, AR264: 9, AR247: 9, AR233: 8, AR238: 8, AR165: 8, AR177: 8, AR193: 8, AR269: 8, AR164: 8, AR240: 8, |
| | | | | AR270: 7, AR166: 7, AR198: 7, AR268: 7, AR229: 7, AR300: 7, AR176: 7, AR180: 7, AR174: 7, AR236: 6, AR228: 6, AR234: 6, AR201: 6, AR226: 6, AR213: 6, AR089: 6, |
| | | | | AR237: 6, AR275: 6, AR179: 6, AR181: 6, AR257: 6, AR183: 6, AR053: 6, AR197: 6, AR178: 6, AR204: 6, AR182: 6, AR262: 6, AR245: 6, AR274: 6, AR299: 5, AR231: 5, |
| | | | | AR096: 5, AR312: 5, AR239: 5, AR191: 5, AR266: 5, AR212: 5, AR293: 5, AR309: 5, AR271: 5, AR207: 5, AR173: 5, AR263: 5, AR267: 5, AR189: 5, AR192: 5, AR291: 5, |
| | | | | AR287: 4, AR185: 4, AR252: 4, AR175: 4, AR290: 4, AR253: 4, AR272: 4, AR190: 4, AR286: 4, AR230: 4, AR296: 4, AR285: 4, AR288: 4, AR196: 4, AR261: 4, AR246: 4, |
| | | | | AR061: 4, AR235: 4, AR289: 3, AR195: 3, AR282: 3, AR311: 3, AR294: 3, AR277: 3, AR227: 3, AR258: 3, AR199: 3, AR205: 3, AR200: 3, AR172: 3, AR316: 3, AR243: 3, |
| | | | | AR033: 3, AR255: 3, AR308: 3, AR232: 3, AR203: 3, AR188: 3, AR225: 3, AR039: 3, AR295: 3, AR297: 3, AR250: 3, AR060: 3, AR216: 3, AR168: 2, AR104: 2, AR283: 2, |
| | | | | AR055: 2, AR222: 1, AR171: 1, AR217: 1, AR254: 1, AR214: 1, AR260: 1, H0318: 1 and S0386: 1. |
| 20 | HBJLH40 | 828130 | 30 | AR201: 14, AR178: 14, AR176: 13, AR296: 13, AR233: 12, AR181: 12, AR197: 11, AR228: 11, AR192: 11, AR177: 10, AR267: 10, AR162: 10, AR193: 10, AR174: 10, |
| | | | | AR161: 10, AR163: 9, AR175: 9, AR235: 9, AR269: 9, AR287: 9, AR270: 9, AR266: 9, AR165: 9, AR257: 9, AR182: 9, AR242: 9, AR198: 8, AR191: 8, AR293: 8, AR183: 8, |
| | | | | AR061: 8, AR179: 8, AR164: 8, AR254: 8, AR261: 8, AR226: 8, AR291: 8, AR236: 8, AR033: 8, AR239: 8, AR238: 8, AR169: 8, AR196: 8, AR195: 7, AR207: 7, AR299: 7, |
| | | | | AR166: 7, AR271: 7, AR294: 7, AR288: 7, AR231: 7, AR286: 7, AR230: 7, AR180: 7, AR268: 7, AR203: 7, AR173: 7, AR246: 7, AR227: 7, AR245: 7, AR300: 7, AR190: 6, |
| | | | | AR309: 6, AR229: 6, AR285: 6, AR204: 6, AR224: 6, AR232: 6, AR243: 6, AR282: 6, AR053: 6, AR255: 6, AR289: 6, AR221: 6, AR247: 6, AR295: 6, AR199: 6, AR262: 6, |
| | | | | AR189: 6, AR237: 6, AR060: 5, AR297: 5, AR234: 5, AR290: 5, AR212: 5, AR200: 5, AR188: 5, AR205: 5, AR263: 5, AR308: 5, AR168: 5, AR055: 5, AR213: 5, AR223: 4, |
| | | | | AR252: 4, AR240: 4, AR264: 4, AR222: 4, AR185: 4, AR253: 4, AR275: 4, AR274: 4, AR312: 4, AR260: 4, AR089: 4, AR258: 4, AR216: 4, AR316: 4, AR250: 3, AR277: 3, |
| | | | | AR171: 3, AR283: 3, AR217: 3, AR313: 3, AR256: 3, AR096: 3, AR172: 2, AR311: 2, AR211: 2, AR104: 2, AR214: 2, AR272: 2, AR039: 2, AR218: 1, AR225: 1, AR215: 1, |
| | | | | AR210: 1, AR219: 1, H0318: 6, L0766: 5, L0777: 4, L0439: 3, H0583: 2, H0734: 2, L0803: 2, L0805: 2, L0438: 2, L0747: 2, H0650: 1, |
| | | | | H0656: 1, S0222: 1, H0264: 1, H0488: 1, |
| | | | | L0774: 1, L0655: 1, L0731: 1, S0436: 1 and L0599: 1. |
| 21 | HBXFL29 | 842802 | 31 | AR243: 4, AR275: 3, AR213: 3, AR197: 2, AR180: 2, AR263: 2, AR283: 2, AR240: 2, AR183: 2, AR264: 2, AR039: 2, AR225: 2, AR223: 2, AR271: 2, AR172: 2, AR205: 1, |
| | | | | AR200: 1, AR195: 1, AR299: 1, AR266: 1, AR089: 1, AR311: 1, AR270: 1, AR290: 1, AR277: 1, AR216: 1, AR282: 1, AR230: 1, AR245: 1, AR162: 1, AR210: 1, AR161: 1, |
| | | | | AR201: 1, AR163: 1, L0754: 5, L0438: 3, S0380: 3, L0758: 3, S0010: 2, L0638: 2, L0771: 2, L0439: 2, L0755: 2, L0731: 2, H0663: 1, S0360: 1, S6026: 1, S0222: 1, H0370: 1, |
| | | | | H0438: 1, H0574: 1, H0632: 1, S0346: 1, S0182: 1, H0581: 1, H0052: 1, H0596: 1, T0110: 1, H0050: 1, L0471: 1, H0014: 1, H0375: 1, |
| | | | | H0594: 1, H0416: 1, H0032: 1, H0674: 1, |
| | | | | L0455: 1, H0038: 1, H0551: 1, H0412: 1, H0413: 1, H0131: 1, L0769: 1, L0662: 1, L0766: 1, L0803: 1, L0774: 1, L0775: 1, H0547: 1, H0435: 1, H0521: 1, L0777: 1, L0592: 1, |
| | | | | L0608: 1, S0242: 1 and S0194: 1. |
| 22 | HCACU58 | 625923 | 32 | AR170: 4, AR225: 4, AR197: 3, AR253: 3, AR183: 3, AR242: 3, AR270: 2, AR311: 2, AR266: 2, AR275: 2, AR168: 2, AR172: 2, AR223: 2, AR282: 2, AR291: 2, AR169: 2, |
| | | | | AR272: 2, AR195: 2, AR198: 1, AR096: 1, AR240: 1, AR269: 1, AR283: 1, AR192: 1, AR164: 1, AR300: 1, AR224: 1, AR252: 1, H0341: 1, H0125: 1, H0580: 1, L0747: 1 and |
| | | | | L0749: 1. |
| 23 | HCDBW86 | 520435 | 33 | AR239: 9, AR231: 9, AR161: 7, AR162: 7, AR163: 7, AR226: 6, AR176: 6, AR266: 6, AR269: 6, AR181: 5, AR228: 5, AR238: 5, AR183: 5, AR268: 5, AR236: 5, AR233: 5, |
| | | | | AR237: 5, AR261: 5, AR257: 5, AR180: 5, AR173: 5, AR177: 4, AR196: 4, AR262: 4, AR267: 4, AR214: 4, AR175: 4, AR309: 4, AR229: 4, AR215: 4, AR270: 4, AR263: 4, |
| | | | | AR234: 4, AR182: 4, AR235: 4, AR275: 4, AR227: 4, AR178: 4, AR165: 4, AR291: 4, AR171: 4, AR179: 4, AR164: 3, AR191: 3, AR166: 3, AR230: 3, AR289: 3, AR313: 3, |
| | | | | AR240: 3, AR247: 3, AR255: 3, AR061: 3, AR272: 3, AR199: 3, AR168: 3, AR300: 3, AR174: 3, AR170: 3, AR222: 3, AR293: 3, AR296: 3, AR258: 3, AR288: 3, AR190: 2, |
| | | | | AR188: 2, AR286: 2, AR290: 2, AR264: 2, AR207: 2, AR053: 2, AR294: 2, AR297: 2, AR224: 2, AR287: 2, AR285: 2, AR200: 2, AR312: 2, AR277: 2, AR282: 2, AR225: 2, |
| | | | | AR295: 2, AR203: 2, AR189: 2, AR172: 2, AR299: 2, AR256: 2, AR096: 2, AR246: 2, AR316: 2, AR216: 2, AR221: 2, AR232: 2, AR210: 2, AR185: 1, AR055: 1, AR260: 1, |
| | | | | AR311: 1, AR089: 1, AR060: 1, AR218: 1, AR213: 1, AR211: 1, AR219: 1, AR250: 1, AR217: 1, AR201: 1, AR308: 1, H0251: 1 |
| 24 | HCE3G69 | 728432 | 34 | AR033: 18, AR197: 14, AR195: 13, AR196: 11, AR271: 10, AR242: 10, AR243: 9, AR165: 9, AR201: 9, AR207: 9, AR164: 9, AR182: 9, AR166: 9, AR269: 8, AR198: 8, |
| | | | | AR235: 8, AR161: 8, AR162: 8, AR183: 8, AR272: 8, AR268: 8, AR296: 8, AR163: 8, AR176: 8, AR193: 8, AR238: 7, AR254: 7, AR200: 7, AR247: 7, AR181: 7, AR291: 7, |
| | | | | AR225: 7, AR309: 6, AR178: 6, AR270: 6, AR188: 6, AR173: 6, AR266: 6, AR228: 6, AR282: 6, AR246: 6, AR169: 6, AR213: 6, AR212: 6, AR192: 6, AR177: 6, AR261: 6, |
| | | | | AR250: 6, AR175: 6, AR204: 6, AR239: 6, AR233: 6, AR234: 6, AR255: 6, AR288: 5, AR171: 5, AR267: 5, AR217: 5, AR290: 5, AR168: 5, AR223: 5, AR236: 5, AR089: 5, |
| | | | | AR289: 5, AR191: 5, AR203: 5, AR224: 5, AR245: 5, AR061: 5, AR104: 5, AR308: 5, AR229: 5, AR205: 5, AR060: 5, AR039: 5, AR231: 5, AR240: 5, AR053: 5, AR274: 5, |
| | | | | AR287: 5, AR222: 5, AR216: 5, AR316: 5, AR214: 5, AR215: 5, AR264: 5, AR199: 5, AR174: 5, AR221: 5, AR297: 5, AR312: 4, AR180: 4, AR313: 4, AR295: 4, AR179: 4, |
| | | | | AR170: 4, AR263: 4, AR293: 4, AR253: 4, AR299: 4, AR232: 4, AR257: 4, AR189: 4, AR300: 4, AR294: 4, AR311: 4, AR237: 4, AR285: 4, AR210: 4, AR275: 4, AR172: 4, |
| | | | | AR190: 4, AR226: 4, AR211: 4, AR230: 4, AR185: 3, AR286: 3, AR227: 3, AR262: 3, AR055: 3, AR256: 3, AR277: 3, AR096: 3, AR258: 3, AR219: 2, AR283: 2, AR260: 2, |
| | | | | AR218: 2, AR252: 1, L0439: 9, H0052: 7, L0748: 7, S0440: 5, L0758: 5, H0046: 4, H0038: 4, L0769: 4, S0442: 3, H0013: 3, |
| | | | | H0253: 3, T0010: 3, L0774: 3, L0776: 3, H0144: 3, |
| | | | | H0521: 3, S0404: 3, L0752: 3, L0731: 3, H0656: 2, S0358: 2, S0360: 2, S0222: 2, H0618: 2, H0620: 2, L0351: 2, S0422: 2, L0764: 2, L0771: 2, L0783: 2, L0793: 2, H0658: 2, |
| | | | | H0666: 2, L0751: 2, L0754: 2, L0745: 2, L0747: 2, L0750: 2, H0624: 1, H0265: 1, H0556: 1, H0686: 1, S0134: 1, S0212: 1, S0001: 1, H0254: 1, H0661: 1, L0946: 1, S0354: 1, |
| | | | | S0444: 1, S0408: 1, H0734: 1, L3081: 1, S0300: 1, S0278: 1, H0369: 1, H0370: 1, H0333: 1, H0574: 1, H0486: 1, H0036: 1, H0263: 1, |
| | | | | H0597: 1, H0545: 1, H0572: 1, H0024: 1, |
| | | | | S0388: 1, S0051: 1, S0250: 1, H0252: 1, H0428: 1, H0039: 1, H0644: 1, L0055: 1, H0674: 1, H0135: 1, H0087: 1, T0067: 1, H0488: 1, L3154: 1, H0529: 1, L0763: 1, L0770: 1, |
| | | | | L3905: 1, L0761: 1, L0374: 1, L0662: 1, L0768: 1, L0766: 1, L0803: 1, L0775: 1, L0805: 1, L0653: 1, L0661: 1, L0526: 1, L5622: 1, L0666: 1, L0664: 1, L0665: 1, S0053: 1, |
| | | | | L0710: 1, L2654: 1, H0547: 1, H0682: 1, H0435: 1, H0670: 1, H0660: 1, H0648: 1, H0672: 1, S0328: 1, H0539: 1, S0152: 1, H0696: 1, S0044: 1, S0406: 1, H0631: 1, S3014: 1, |
| | | | | S0028: 1, L0742: 1, L0749: 1, L0753: 1, L0759: 1, S0436: 1, S0011: 1, S0192: 1, H0542: 1, H0423: 1, S0398: 1 and H0506: 1. |
| | HCE3G69 | 494346 | 209 | |
| 25 | HCEEA88 | 634967 | 35 | AR196: 17, AR089: 13, AR055: 13, AR283: 12, AR235: 10, AR191: 10, AR060: 9, AR172: 9, AR185: 9, AR104: 9, AR295: 8, AR291: 8, AR174: 8, AR282: 8, AR316: 8, |
| | | | | AR096: 8, AR190: 8, AR285: 8, AR161: 8, AR162: 8, AR261: 8, AR188: 7, AR223: 7, AR224: 7, AR163: 7, AR299: 7, AR166: 7, AR165: 7, AR200: 7, AR225: 7, AR275: 7, |
| | | | | AR164: 7, AR236: 7, AR175: 7, AR240: 7, AR216: 6, AR177: 6, AR309: 6, AR219: 6, AR171: 6, AR311: 6, AR274: 6, AR218: 6, AR260: 6, AR313: 6, AR189: 6, AR176: 6, |
| | | | | AR266: 6, AR289: 6, AR288: 6, AR221: 5, AR168: 5, AR257: 5, AR217: 5, AR297: 5, AR296: 5, AR277: 5, AR308: 5, AR181: 5, AR183: 5, AR287: 5, AR053: 5, AR173: 5, |
| | | | | AR269: 5, AR270: 5, AR262: 5, AR214: 5, AR222: 5, AR195: 5, AR272: 5, AR255: 4, AR258: 4, AR178: 4, AR213: 4, AR312: 4, AR210: 4, AR300: 4, AR294: 4, AR286: 4, |
| | | | | AR290: 4, AR182: 4, AR247: 4, AR293: 4, AR170: 4, AR268: 4, AR212: 4, AR238: 4, AR033: 4, AR215: 4, AR199: 4, AR246: 4, AR205: 3, AR271: 3, AR180: 3, AR211: 3, |
| | | | | AR039: 3, AR179: 3, AR237: 3, AR264: 3, AR239: 3, AR228: 3, AR193: 3, AR256: 3, AR263: 3, AR267: 3, AR234: 3, AR226: 2, AR229: 2, AR231: 2, AR233: 2, AR201: 2, |
| | | | | AR243: 2, AR061: 2, AR232: 2, AR207: 2, AR169: 2, AR203: 2, AR192: 1, AR230: 1, AR252: 1, H0659: 4, L0770: 3, L0747: 3, H0663: 2, S0360: 2, L3388: 2, L0521: 2, |
| | | | | L0776: 2, S0126: 2, H0658: 2, S0406: 2, L0748: 2, L0755: 2, L0758: 2, L0759: 2, S0242: 2, T0002: 1, H0686: 1, H0341: 1, L3659: 1, L0616: 1, S0354: 1, S0408: 1, H0052: 1, |
| | | | | H0009: 1, H0051: 1, H0083: 1, H0266: 1, H0615: 1, L0483: 1, H0040: 1, H0561: 1, S0422: 1, L0520: 1, L0625: 1, L0662: 1, L0766: 1, L0649: 1, L0519: 1, L3661: 1, L3811: 1, |
| | | | | H0648: 1, S3014: 1 and L0779: 1. |
| 26 | HCEFB69 | 748245 | 36 | AR241: 76, AR313: 37, AR184: 27, AR052: 20, AR039: 18, AR192: 16, AR269: 15, AR186: 15, AR300: 15, AR259: 14, AR270: 14, AR198: 14, AR265: 14, AR182: 14, |
| | | | | AR292: 14, AR096: 14, AR312: 14, AR185: 13, AR229: 13, AR299: 13, AR275: 13, AR247: 12, AR204: 12, AR089: 12, AR162: 12, AR161: 12, AR240: 12, AR177: 12, |
| | | | | AR163: 12, AR285: 11, AR243: 11, AR218: 11, AR053: 11, AR273: 11, AR249: 11, AR233: 10, AR298: 10, AR248: 10, AR194: 10, AR238: 10, AR267: 10, AR258: 10, |
| | | | | AR271: 10, AR293: 10, AR286: 10, AR310: 10, AR268: 10, AR274: 9, AR296: 9, AR175: 9, AR244: 8, AR226: 8, AR219: 8, AR104: 8, AR033: 8, AR284: 8, AR290: 8, |
| | | | | AR315: 8, AR213: 8, AR251: 8, AR282: 7, AR277: 7, AR234: 7, AR314: 7, AR237: 7, AR202: 7, AR289: 6, AR256: 6, AR294: 6, AR316: 6, AR179: 6, AR291: 6, AR206: 6, |
| | | | | AR231: 6, AR178: 6, AR264: 6, AR309: 6, AR227: 6, AR180: 6, AR263: 6, AR253: 6, AR183: 5, AR060: 5, AR280: 5, AR266: 5, AR173: 4, AR176: 4, AR181: 4, AR174: 4, |
| | | | | AR295: 4, AR061: 4, AR055: 4, AR242: 4, AR205: 3, AR236: 3, AR283: 3, AR165: 3, AR196: 3, AR232: 3, AR164: 3, AR230: 3, AR246: 3, AR272: 3, AR166: 3, AR239: 3, |
| | | | | AR281: 3, AR171: 3, AR228: 2, AR288: 2, AR225: 2, AR193: 2, AR257: 2, AR287: 2, AR311: 2, AR223: 2, AR262: 2, AR212: 2, AR188: 2, AR245: 2, AR261: 2, AR189: 2, |
| | | | | AR191: 1, AR200: 1, AR297: 1, AR210: 1, AR199: 1, H0542: 3, S6028: 2, L0745: 2, S0360: 1, S0046: 1, S0222: 1, H0497: 1, H0486: 1, |
| | | | | H0013: 1, S0010: 1, H0052: 1, S0406: 1 |
| | | | | and L0439: 1. |
| 27 | HCFMV71 | 526599 | 37 | AR309: 31, AR311: 23, AR308: 18, AR312: 17, AR313: 9, AR264: 6, AR053: 6, AR263: 6, AR170: 6, AR198: 5, AR096: 5, AR207: 5, |
| | | | | AR161: 5, AR162: 5, AR192: 5, AR197: 5, |
| | | | | AR214: 5, AR089: 5, AR235: 4, AR163: 4, AR165: 4, AR240: 4, AR166: 4, AR246: 4, AR164: 4, AR261: 4, AR253: 4, AR277: 4, AR176: 4, AR212: 4, AR272: 4, AR195: 4, |
| | | | | AR274: 4, AR252: 4, AR245: 4, AR271: 4, AR270: 4, AR223: 4, AR213: 4, AR316: 4, AR217: 4, AR039: 4, AR282: 4, AR177: 4, AR230: 3, AR193: 3, AR222: 3, AR178: 3, |
| | | | | AR104: 3, AR224: 3, AR289: 3, AR183: 3, AR295: 3, AR290: 3, AR286: 3, AR237: 3, AR297: 3, AR275: 3, AR288: 3, AR268: 3, AR200: 3, AR238: 3, AR060: 3, AR234: 3, |
| | | | | AR180: 3, AR226: 3, AR247: 3, AR239: 2, AR291: 2, AR201: 2, AR216: 2, AR269: 2, AR285: 2, AR033: 2, AR228: 2, AR174: 2, AR262: 2, AR229: 2, AR181: 2, AR055: 2, |
| | | | | AR243: 2, AR185: 2, AR267: 2, AR232: 2, AR300: 2, AR205: 2, AR221: 2, AR182: 2, AR231: 2, AR293: 2, AR233: 2, AR299: 2, AR287: 2, AR227: 2, AR188: 2, AR175: 2, |
| | | | | AR061: 2, AR283: 2, AR294: 2, AR296: 2, AR203: 2, AR257: 2, AR196: 2, AR266: 1, AR258: 1, AR171: 1, AR225: 1, AR190: 1, AR219: 1, AR254: 1, AR179: 1, AR255: 1, |
| | | | | AR210: 1, AR168: 1, S0358: 11, S0408: 4, S0376: 2, S0444: 2, H0597: 2, H0231: 2, L0764: 2, L0771: 2, S0354: 1, H0085: 1, H0154: 1, S0374: 1, S0404: 1 and H0423: 1. |
| 28 | HCNSD93 | 630649 | 38 | AR089: 9, AR161: 7, AR162: 7, AR163: 7, AR060: 7, AR176: 7, AR165: 6, AR164: 6, AR240: 6, AR166: 6, AR293: 6, AR182: 6, AR247: 6, AR236: 6, AR269: 6, AR181: 5, |
| | | | | AR055: 5, AR233: 5, AR297: 5, AR228: 5, AR275: 5, AR229: 5, AR299: 5, AR255: 5, AR261: 5, AR257: 5, AR300: 5, AR270: 5, AR231: 5, AR267: 5, AR183: 5, AR266: 5, |
| | | | | AR295: 4, AR179: 4, AR177: 4, AR243: 4, AR282: 4, AR196: 4, AR262: 4, AR178: 4, AR268: 4, AR207: 4, AR185: 4, AR288: 4, AR191: 4, AR238: 4, AR285: 4, AR287: 4, |
| | | | | AR239: 4, AR237: 4, AR289: 4, AR039: 4, AR217: 4, AR190: 4, AR175: 4, AR221: 4, AR222: 4, AR235: 3, AR316: 3, AR309: 3, AR296: 3, AR225: 3, AR290: 3, AR294: 3, |
| | | | | AR200: 3, AR096: 3, AR188: 3, AR170: 3, AR201: 3, AR313: 3, AR203: 3, AR174: 3, AR193: 3, AR286: 3, AR230: 3, AR204: 3, AR173: 3, AR234: 3, AR291: 3, AR224: 3, |
| | | | | AR104: 3, AR168: 3, AR226: 3, AR242: 3, AR061: 3, AR227: 3, AR197: 3, AR033: 3, AR189: 3, AR218: 2, AR199: 2, AR256: 2, AR277: 2, AR258: 2, AR283: 2, AR312: 2, |
| | | | | AR172: 2, AR260: 2, AR232: 2, AR271: 2, AR216: 2, AR180: 2, AR053: 2, AR215: 2, AR264: 2, AR311: 1, AR211: 1, AR219: 1, AR214: 1, |
| | | | | L3388: 3, H0231: 2 and L0532: 1. |
| 29 | HCUIM65 | 550208 | 39 | AR223: 4, AR215: 3, AR268: 3, AR270: 3, AR250: 3, AR161: 3, AR246: 3, AR162: 3, AR166: 2, AR171: 2, AR254: 2, AR217: 2, AR213: 2, AR177: 2, AR089: 2, AR243: 2, |
| | | | | AR290: 2, AR257: 2, AR269: 2, AR288: 1, AR313: 1, AR179: 1, AR205: 1, AR309: 1, AR165: 1, AR163: 1, AR170: 1, AR261: 1, AR225: 1, AR195: 1, AR240: 1, AR181: 1, |
| | | | | AR238: 1, AR193: 1, AR299: 1, L0789: 4, L0809: 2, L0759: 2, L0596: 2, H0306: 1, H0402: 1, H0580: 1, H0550: 1, H0370: 1, |
| | | | | H0404: 1, H0559: 1, H0486: 1, H0031: 1, H0674: 1, |
| | | | | H0135: 1, H0100: 1, L0800: 1, L0794: 1, L0804: 1, L0805: 1, L0515: 1, L0783: 1, H0672: 1, L0777: 1, H0444: 1 and H0352: 1. |
| 30 | HCWKC15 | 553621 | 40 | AR313: 9, AR164: 8, AR165: 8, AR166: 8, AR163: 7, AR161: 7, AR162: 7, AR089: 6, AR039: 5, AR173: 5, AR096: 5, AR180: 5, AR192: 4, AR263: 4, AR299: 4, AR282: 4, |
| | | | | AR242: 4, AR053: 4, AR178: 4, AR175: 4, AR247: 4, AR269: 4, AR296: 4, AR257: 3, AR212: 3, AR174: 3, AR240: 3, AR262: 3, AR196: 3, AR274: 3, AR312: 3, AR234: 3, |
| | | | | AR229: 3, AR199: 3, AR243: 3, AR264: 3, AR185: 3, AR300: 3, AR179: 3, AR311: 3, AR191: 3, AR293: 3, AR181: 3, AR272: 3, AR297: 3, AR213: 3, AR171: 3, AR270: 3, |
| | | | | AR183: 3, AR238: 3, AR236: 3, AR316: 3, AR060: 3, AR308: 3, AR294: 3, AR266: 3, AR226: 3, AR177: 3, AR258: 3, AR285: 2, AR104: 2, AR233: 2, AR172: 2, AR193: 2, |
| | | | | AR197: 2, AR291: 2, AR231: 2, AR188: 2, AR219: 2, AR255: 2, AR275: 2, AR189: 2, AR237: 2, AR290: 2, AR295: 2, AR287: 2, AR277: 2, AR218: 2, AR267: 2, AR182: 2, |
| | | | | AR228: 2, AR268: 2, AR204: 2, AR190: 2, AR246: 2, AR239: 2, AR232: 2, AR261: 2, AR223: 2, AR201: 2, AR217: 2, AR195: 2, AR260: 1, AR200: 1, AR170: 1, AR286: 1, |
| | | | | AR216: 1, AR288: 1, AR222: 1, AR227: 1, AR230: 1, H0305: 2 and H0589: 1. |
| 31 | HCWLD74 | 628256 | 41 | AR268: 4, AR243: 3, AR270: 3, AR180: 3, AR171: 3, AR282: 3, AR162: 3, AR254: 3, AR252: 2, AR039: 2, AR204: 2, AR238: 2, AR161: 2, AR170: 2, AR269: 2, AR267: 2, |
| | | | | AR257: 2, AR210: 2, AR168: 2, AR262: 2, AR053: 2, AR183: 2, AR299: 2, AR290: 1, AR224: 1, AR311: 1, AR309: 1, AR258: 1, AR277: 1, AR289: 1, AR178: 1, AR217: 1, |
| | | | | AR228: 1, AR312: 1, AR172: 1, AR293: 1, AR164: 1, AR089: 1, AR185: 1, AR205: 1, AR166: 1, AR163: 1, AR313: 1, AR295: 1, AR201: 1, H0305: 3 and H0589: 1. |
| 32 | HDHEB60 | 499233 | 42 | AR195: 10, AR245: 9, AR242: 9, AR309: 9, AR196: 8, AR192: 8, AR225: 8, AR198: 8, AR207: 8, AR246: 8, AR169: 8, AR170: 8, AR223: 8, AR224: 7, AR214: 7, AR039: 7, |
| | | | | AR172: 7, AR215: 7, AR201: 7, AR222: 7, AR193: 7, AR205: 7, AR221: 7, AR199: 7, AR272: 7, AR168: 7, AR089: 7, AR213: 6, AR263: 6, AR165: 6, AR216: 6, AR164: 6, |
| | | | | AR274: 6, AR217: 6, AR261: 6, AR053: 6, AR166: 6, AR055: 6, AR312: 6, AR308: 6, AR197: 6, AR283: 5, AR240: 5, AR282: 5, AR171: 5, AR253: 5, AR235: 5, AR311: 5, |
| | | | | AR295: 5, AR250: 5, AR275: 5, AR243: 5, AR291: 5, AR162: 5, AR297: 5, AR264: 5, AR313: 5, AR288: 5, AR316: 5, AR204: 5, AR163: 5, AR299: 5, AR161: 5, AR257: 5, |
| | | | | AR286: 5, AR271: 5, AR189: 5, AR236: 5, AR210: 5, AR177: 5, AR060: 4, AR212: 4, AR033: 4, AR285: 4, AR188: 4, AR200: 4, AR174: 4, AR287: 4, AR096: 4, AR296: 4, |
| | | | | AR258: 4, AR175: 4, AR218: 4, AR176: 4, AR293: 4, AR180: 4, AR191: 4, AR203: 4, AR219: 4, AR289: 4, AR277: 4, AR256: 4, AR183: 4, AR190: 4, AR247: 4, AR300: 4, |
| | | | | AR181: 3, AR269: 3, AR173: 3, AR262: 3, AR238: 3, AR268: 3, AR178: 3, AR185: 3, AR255: 3, AR270: 3, AR294: 3, AR266: 3, AR211: 3, AR260: 3, AR229: 3, AR104: 3, |
| | | | | AR231: 3, AR267: 3, AR239: 3, AR290: 3, AR182: 3, AR226: 3, AR232: 3, AR061: 2, AR233: 2, AR237: 2, AR227: 2, AR234: 2, AR179: 2, AR230: 2, AR228: 2, H0265: 2, |
| | | | | S0442: 2, S0360: 2, H0581: 2, H0052: 2, H0570: 2, H0087: 2, L0439: 2, H0445: 2, H0650: 1, S0354: 1, H0580: 1, H0741: 1, |
| | | | | H0586: 1, H0559: 1, H0486: 1, L0021: 1, H0618: 1, |
| | | | | H0009: 1, H0571: 1, S0051: 1, S0368: 1, H0553: 1, H0181: 1, H0551: 1, S0294: 1, L3905: 1, L0646: 1, L0764: 1, L0662: 1, L0794: 1, L0658: 1, L0659: 1, L0665: 1, H0547: 1, |
| | | | | H0682: 1, H0684: 1, H0670: 1 and S3014: 1. |
| 33 | HDHMA45 | 902513 | 43 | AR225: 9, AR277: 8, AR214: 8, AR223: 8, AR215: 8, AR165: 7, AR171: 7, AR164: 6, AR170: 6, AR168: 6, AR166: 6, AR224: 6, AR222: 6, AR235: 6, AR172: 6, AR162: 5, |
| | | | | AR216: 5, AR161: 5, AR282: 5, AR217: 5, AR264: 5, AR163: 5, AR297: 5, AR221: 5, AR288: 5, AR180: 5, AR311: 5, AR207: 4, AR212: 4, AR261: 4, AR263: 4, AR178: 4, |
| | | | | AR287: 4, AR257: 4, AR252: 4, AR183: 3, AR176: 3, AR192: 3, AR060: 3, AR291: 3, AR309: 3, AR089: 3, AR240: 3, AR308: 3, AR289: 3, AR181: 3, AR196: 3, AR173: 3, |
| | | | | AR285: 3, AR283: 3, AR239: 3, AR262: 3, AR295: 3, AR316: 3, AR233: 3, AR296: 3, AR232: 3, AR200: 3, AR286: 3, AR312: 3, AR195: 3, AR228: 3, AR299: 3, AR213: 3, |
| | | | | AR234: 3, AR191: 3, AR293: 3, AR238: 3, AR294: 3, AR096: 3, AR104: 3, AR247: 3, AR229: 3, AR300: 3, AR184: 3, AR266: 3, AR242: 3, AR271: 3, AR211: 2, AR169: 2, |
| | | | | AR255: 2, AR245: 2, AR236: 2, AR313: 2, AR231: 2, AR258: 2, AR269: 2, AR201: 2, AR268: 2, AR198: 2, AR203: 2, AR039: 2, AR260: 2, AR179: 2, AR174: 2, AR190: 2, |
| | | | | AR230: 2, AR055: 2, AR175: 2, AR290: 2, AR275: 2, AR185: 2, AR033: 2, AR177: 2, AR189: 2, AR270: 2, AR210: 2, AR205: 2, AR227: 2, AR188: 2, AR253: 2, AR243: 2, |
| | | | | AR267: 2, AR182: 2, AR226: 2, AR310: 2, AR274: 2, AR202: 2, AR273: 1, AR272: 1, AR199: 1, AR053: 1, AR237: 1, AR254: 1, AR218: 1, AR061: 1, AR256: 1, AR265: 1, |
| | | | | AR292: 1, AR193: 1, AR284: 1, L0794: 5, L0769: 4, L0749: 3, S0110: 1, H0572: 1, H0050: 1, L0765: 1, L0756: 1, L0755: 1 and L0758: 1. |
| | HDHMA45 | 812764 | 210 | |
| 34 | HDHMA72 | 547772 | 44 | AR184: 7, AR254: 6, AR265: 6, AR207: 6, AR235: 5, AR165: 5, AR222: 5, AR197: 5, AR164: 5, AR264: 5, AR166: 5, AR162: 5, AR161: 5, AR270: 5, AR163: 5, AR311: 5, |
| | | | | AR170: 4, AR272: 4, AR274: 4, AR180: 4, AR195: 4, AR252: 4, AR308: 4, AR212: 4, AR269: 4, AR053: 4, AR312: 4, AR224: 4, AR271: 4, AR196: 4, AR193: 4, AR261: 3, |
| | | | | AR275: 3, AR217: 3, AR183: 3, AR178: 3, AR290: 3, AR194: 3, AR282: 3, AR309: 3, AR284: 3, AR213: 3, AR169: 3, AR186: 3, AR215: 3, AR289: 3, AR268: 3, AR297: 3, |
| | | | | AR175: 3, AR171: 3, AR245: 3, AR291: 3, AR033: 3, AR267: 3, AR257: 3, AR288: 3, AR182: 3, AR188: 3, AR201: 3, AR191: 3, AR292: 3, AR241: 3, AR294: 3, AR221: 3, |
| | | | | AR293: 3, AR206: 3, AR104: 3, AR205: 3, AR214: 3, AR198: 3, AR238: 3, AR216: 3, AR189: 2, AR263: 2, AR199: 2, AR295: 2, AR246: 2, AR226: 2, AR089: 2, AR251: 2, |
| | | | | AR185: 2, AR296: 2, AR173: 2, AR273: 2, AR223: 2, AR240: 2, AR255: 2, AR237: 2, AR249: 2, AR190: 2, AR172: 2, AR287: 2, AR299: 2, AR277: 2, AR286: 2, AR096: 2, |
| | | | | AR285: 2, AR200: 2, AR232: 2, AR060: 2, AR203: 2, AR298: 2, AR181: 2, AR236: 2, AR174: 2, AR219: 2, AR262: 2, AR239: 2, AR247: 2, AR229: 2, AR258: 2, AR316: 2, |
| | | | | AR313: 2, AR300: 2, AR179: 2, AR260: 2, AR225: 2, AR310: 2, AR234: 2, AR243: 2, AR052: 1, AR231: 1, AR039: 1, AR168: 1, AR210: 1, AR176: 1, AR266: 1, AR218: 1, |
| | | | | AR259: 1, AR233: 1, AR227: 1, AR177: 1, AR244: 1, AR281: 1, AR061: 1, AR256: 1, AR283: 1, L0766: 4, L0438: 4, H0575: 3, H0050: 3, L0770: 3, L0757: 3, L0758: 3, |
| | | | | H0556: 2, H0013: 2, T0110: 2, H0572: 2, L0803: 2, S0126: 2, L0439: 2, S0408: 1, S0132: 1, H0619: 1, S6016: 1, L3816: 1, L3503: 1, L3653: 1, H0266: 1, S0250: 1, H0615: 1, |
| | | | | H0428: 1, H0039: 1, S0036: 1, H0591: 1, H0040: 1, H0616: 1, H0056: 1, T0041: 1, L0769: 1, L0637: 1, L0794: 1, L0804: 1, L0805: 1, L5622: 1, L0666: 1, L2653: 1, H0648: 1, |
| | | | | H0539: 1, S0152: 1, H0696: 1, S0406: 1, S0028: 1, L0748: 1, L0740: 1, L0756: 1, L0780: 1, L0752: 1, L0592: 1 and L0096: 1. |
| 35 | HDPBA28 | 1062783 | 45 | AR249: 72, AR213: 48, AR253: 40, AR096: 37, AR052: 37, AR263: 33, AR053: 32, AR212: 31, AR265: 27, AR184: 26, AR254: 26, AR264: 22, AR248: 18, AR251: 17, |
| | | | | AR240: 17, AR313: 16, AR268: 14, AR272: 13, AR290: 13, AR311: 13, AR310: 13, AR177: 13, AR180: 13, AR246: 13, AR245: 10, AR250: 10, AR309: 10, AR275: 10, |
| | | | | AR183: 9, AR247: 9, AR274: 9, AR312: 9, AR039: 9, AR308: 9, AR269: 9, AR271: 8, AR179: 8, AR270: 8, AR267: 8, AR316: 7, AR198: 7, AR252: 7, AR244: 7, AR243: 7, |
| | | | | AR175: 6, AR193: 6, AR195: 6, AR165: 6, AR299: 6, AR192: 6, AR166: 6, AR201: 6, AR164: 6, AR162: 6, AR161: 6, AR242: 6, AR163: 6, AR273: 6, AR300: 5, AR197: 5, |
| | | | | AR284: 5, AR282: 5, AR055: 5, AR181: 4, AR169: 4, AR174: 4, AR185: 4, AR061: 4, AR089: 4, AR298: 4, AR259: 4, AR234: 4, AR293: 3, AR182: 3, AR202: 3, AR205: 3, |
| | | | | AR231: 3, AR215: 3, AR283: 3, AR236: 3, AR225: 3, AR173: 2, AR178: 2, AR060: 2, AR294: 2, AR186: 2, AR296: 2, AR222: 2, AR285: 2, AR281: 2, AR104: 2, AR292: 2, |
| | | | | AR176: 2, AR295: 2, AR207: 2, AR217: 2, AR229: 2, AR289: 2, AR226: 2, AR291: 2, AR206: 2, AR172: 2, AR288: 2, AR033: 2, AR235: 2, AR238: 2, AR191: 2, AR170: 2, |
| | | | | AR194: 2, AR232: 2, AR230: 2, AR286: 2, AR189: 1, AR257: 1, AR190: 1, AR199: 1, AR277: 1, AR287: 1, AR200: 1, AR224: 1, AR171: 1, AR297: 1, AR223: 1, AR168: 1, |
| | | | | AR228: 1, AR266: 1, AR258: 1, AR233: 1, AR204: 1, AR262: 1, AR315: 1, AR255: 1, AR237: 1, AR280: 1, H0521: 4, L0454: 2, S0442: 2, L0758: 2, H0720: 1, H0255: 1, |
| | | | | S0376: 1, H0486: 1, H0581: 1, H0373: 1, H0268: 1, S0440: 1, L0763: 1, L0803: 1, H0435: 1, H0658: 1, L3833: 1, H0522: 1, L0748: 10, L0749: 1, L0588: 1 and H0543: 1. |
| | HDPBA28 | 866429 | 211 | |
| 36 | HDPCO25 | 460682 | 46 | AR060: 2, AR055: 2, AR282: 2, H0521: 2, H0445: 2, H0394: 1, H0747: 1, H0581: 1, L0761: 1 and L0750: 1. |
| 37 | HDPCY37 | 837699 | 47 | AR215: 26, AR214: 25, AR263: 23, AR197: 22, AR207: 22, AR217: 19, AR195: 19, AR212: 19, AR169: 19, AR222: 18, AR168: 18, AR269: 17, AR243: 37, AR216: 16, |
| | | | | AR172: 16, AR264: 16, AR225: 16, AR171: 16, AR224: 16, AR223: 16, AR311: 16, AR221: 15, AR253: 15, AR165: 15, AR198: 15, AR246: 15, AR164: 15, AR192: 15, |
| | | | | AR277: 14, AR240: 14, AR170: 14, AR166: 14, AR162: 14, AR161: 14, AR213: 14, AR163: 13, AR096: 13, AR245: 13, AR089: 13, AR299: 13, AR242: 13, AR309: 12, |
| | | | | AR183: 12, AR316: 12, AR308: 12, AR219: 12, AR193: 12, AR312: 12, AR201: 12, AR235: 12, AR313: 12, AR250: 12, AR196: 11, AR282: 11, AR205: 11, AR283: 11, |
| | | | | AR053: 11, AR236: 11, AR275: 11, AR291: 10, AR295: 10, AR272: 10, AR252: 10, AR218: 10, AR270: 10, AR185: 10, AR288: 10, AR268: 10, AR261: 10, AR039: 10, |
| | | | | AR297: 9, AR199: 9, AR247: 9, AR285: 9, AR173: 9, AR033: 9, AR060: 9, AR191: 9, AR177: 9, AR174: 9, AR175: 9, AR290: 9, AR181: 8, AR300: 8, AR238: 8, AR211: 8, |
| | | | | AR210: 8, AR286: 8, AR176: 8, AR188: 8, AR182: 8, AR287: 8, AR296: 8, AR271: 8, AR293: 8, AR231: 8, AR061: 7, AR055: 7, AR200: 7, AR180: 7, AR254: 7, AR104: 7, |
| | | | | AR289: 7, AR204: 7, AR267: 6, AR239: 6, AR190: 6, AR234: 6, AR189: 6, AR266: 6, AR178: 6, AR274: 6, AR262: 6, AR226: 6, AR179: 6, AR258: 6, AR256: 6, AR257: 6, |
| | | | | AR229: 6, AR255: 6, AR232: 6, AR203: 5, AR294: 5, AR233: 5, AR228: 4, AR227: 4, AR237: 4, AR260: 4, AR230: 4, S0440: 6, L0766: 4, L3659: 3, H0052: 3, L0662: 3, |
| | | | | L0776: 3, L0666: 3, L0665: 3, H0521: 3, S0476: 2, H0438: 2, H0581: 2, H0263: 2, H0494: 2, L0763: 2, L0770: 2, L0769: 2, L0649: 2, L0659: 2, L0664: 2, L2261: 2, L3829: 2, |
| | | | | L0748: 2, L0439: 2, L0747: 2, S0436: 2, H0265: 1, H0556: 1, S0040: 1, H0717: 1, S0444: 1, S0278: 1, H0415: 1, H0403: 1, H0643: 1, S0280: 1, H0575: 1, H0194: 1, H0309: 1, |
| | | | | H0545: 1, H0046: 1, L0157: 1, H0375: 1, L0483: 1, H0553: 1, H0412: 1, H0646: 1, S0002: 1, L0796: 1, L3905: 1, L0644: 1, L0764: 1, L0774: 1, L0376: 1, L0806: 1, L0654: 1, |
| | | | | L0807: 1, L0383: 1, L3841: 1, L2651: 1, L2263: 1, L2260: 1, L2262: 1, S0126: 1, H0684: 1, H0435: 1, H0478: 1, S0028: 1, L0751: 1, L0754: 1, L0749: 1, L0750: 1, L0779: 1, |
| | | | | L0759: 1, H0543: 1, H0423: 1 and L3837: 1. |
| | HDPCY37 | 604114 | 212 | |
| 38 | HDPHI51 | 460679 | 48 | AR195: 9, AR192: 9, AR207: 9, AR215: 8, AR264: 8, AR225: 7, AR263: 7, AR311: 7, AR168: 7, AR309: 7, AR252: 6, AR172: 6, AR245: 6, AR161: 6, AR162: 6, AR163: 6, |
| | | | | AR196: 6, AR223: 6, AR193: 6, AR177: 6, AR246: 6, AR224: 6, AR197: 5, AR308: 5, AR272: 5, AR214: 5, AR275: 5, AR222: 5, AR253: 5, AR176: 5, AR261: 5, AR295: 5, |
| | | | | AR291: 5, AR171: 5, AR218: 5, AR221: 5, AR219: 5, AR188: 5, AR165: 5, AR096: 5, AR217: 5, AR238: 5, AR288: 5, AR164: 5, AR175: 5, AR166: 5, AR089: 5, AR271: 5, |
| | | | | AR060: 4, AR240: 4, AR183: 4, AR201: 4, AR257: 4, AR169: 4, AR312: 4, AR316: 4, AR039: 4, AR274: 4, AR190: 4, AR191: 4, AR181: 4, AR178: 4, AR236: 4, AR216: 4, |
| | | | | AR180: 4, AR205: 4, AR210: 4, AR270: 4, AR170: 4, AR277: 4, AR243: 4, AR235: 4, AR212: 4, AR104: 4, AR199: 4, AR189: 4, AR242: 4, AR213: 4, AR255: 4, AR289: 4, |
| | | | | AR174: 3, AR285: 3, AR230: 3, AR286: 3, AR297: 3, AR299: 3, AR283: 3, AR313: 3, AR204: 3, AR287: 3, AR173: 3, AR247: 3, AR229: 3, AR269: 3, AR296: 3, AR182: 3, |
| | | | | AR293: 3, AR266: 3, AR258: 3, AR198: 3, AR237: 3, AR262: 3, AR033: 3, AR239: 3, AR185: 3, AR231: 3, AR203: 3, AR200: 3, AR179: 3, AR211: 3, AR227: 3, AR268: 3, |
| | | | | AR267: 3, AR294: 3, AR290: 3, AR234: 3, AR232: 3, AR226: 3, AR300: 2, AR250: 2, AR282: 2, AR256: 2, AR061: 2, AR053: 2, AR233: 2, AR260: 2, AR228: 2, AR055: 2, |
| | | | | H0521: 1 |
| 39 | HDPND46 | 637586 | 49 | AR252: 7, AR170: 6, AR223: 6, AR207: 6, AR311: 6, AR165: 6, AR263: 5, AR162: 5, AR163: 5, AR164: 5, AR214: 5, AR264: 5, AR195: 5, AR161: 5, AR212: 5, AR308: 5, |
| | | | | AR225: 4, AR166: 4, AR242: 4, AR250: 4, AR053: 4, AR217: 4, AR224: 4, AR193: 4, AR169: 3, AR272: 3, AR222: 3, AR216: 3, AR235: 3, AR312: 3, AR089: 3, AR282: 3, |
| | | | | AR309: 3, AR172: 3, AR197: 3, AR265: 3, AR180: 3, AR313: 3, AR261: 3, AR221: 3, AR168: 3, AR205: 3, AR277: 3, AR241: 3, AR297: 3, AR274: 3, AR213: 3, AR199: 3, |
| | | | | AR181: 3, AR196: 3, AR201: 3, AR245: 2, AR253: 2, AR198: 2, AR275: 2, AR288: 2, AR174: 2, AR247: 2, AR206: 2, AR215: 2, AR176: 2, AR271: 2, AR175: 2, AR171: 2, |
| | | | | AR178: 2, AR246: 2, AR188: 2, AR300: 2, AR200: 2, AR203: 2, AR033: 2, AR096: 2, AR104: 2, AR310: 2, AR296: 2, AR060: 2, AR257: 2, AR295: 2, AR286: 2, AR189: 2, |
| | | | | AR287: 2, AR204: 2, AR191: 2, AR262: 2, AR270: 2, AR183: 2, AR273: 2, AR239: 2, AR210: 2, AR269: 2, AR240: 2, AR192: 2, AR238: 2, AR316: 2, AR185: 2, AR291: 2, |
| | | | | AR173: 2, AR243: 2, AR229: 2, AR299: 2, AR285: 2, AR236: 2, AR266: 2, AR190: 2, AR179: 1, AR293: 1, AR177: 1, AR283: 1, AR039: 1, AR268: 1, AR255: 1, AR290: 1, |
| | | | | AR234: 1, AR061: 1, AR228: 1, AR232: 1, AR231: 1, AR237: 1, AR258: 1, AR267: 1, AR294: 1, AR182: 1, AR227: 1, H0522: 2 and L0055: 1. |
| 40 | HDPOH06 | 683371 | 50 | AR272: 69, AR212: 53, AR214: 43, AR311: 39, AR274: 36, AR245: 35, AR165: 33, AR216: 32, AR308: 32, AR166: 31, AR161: 30, AR162: 30, AR217: 29, AR264: 29, |
| | | | | AR163: 29, AR222: 28, AR164: 28, AR215: 27, AR309: 27, AR171: 26, AR223: 25, AR053: 25, AR252: 23, AR224: 23, AR168: 23, AR174: 22, AR225: 21, AR169: 21, |
| | | | | AR205: 21, AR213: 21, AR195: 21, AR312: 20, AR197: 20, AR172: 19, AR263: 18, AR275: 18, AR247: 17, AR254: 17, AR221: 17, AR170: 17, AR313: 15, AR185: 15, |
| | | | | AR189: 15, AR199: 15, AR236: 15, AR188: 14, AR242: 14, AR201: 14, AR250: 13, AR246: 13, AR193: 13, AR288: 12, AR190: 12, AR297: 11, AR230: 11, AR179: 11, |
| | | | | AR253: 11, AR096: 10, AR243: 10, AR240: 10, AR239: 10, AR262: 9, AR177: 9, AR089: 9, AR300: 9, AR255: 9, AR194: 9, AR287: 9, AR290: 9, AR060: 9, AR173: 9, |
| | | | | AR291: 9, AR238: 9, AR203: 8, AR257: 8, AR271: 8, AR178: 8, AR296: 8, AR200: 8, AR232: 8, AR204: 8, AR289: 8, AR299: 8, AR295: 8, AR293: 8, AR231: 8, AR261: 8, |
| | | | | AR282: 8, AR316: 8, AR234: 8, AR265: 8, AR285: 7, AR191: 7, AR226: 7, AR277: 7, AR181: 7, AR233: 7, AR061: 7, AR180: 6, AR198: 6, AR192: 6, AR237: 6, AR210: 6, |
| | | | | AR283: 6, AR270: 6, AR039: 6, AR228: 6, AR207: 6, AR294: 6, AR280: 6, AR269: 6, AR229: 5, AR186: 5, AR315: 5, AR266: 5, AR183: 5, AR033: 5, AR267: 5, AR268: 5, |
| | | | | AR104: 5, AR211: 5, AR286: 5, AR176: 5, AR227: 5, AR298: 4, AR175: 4, AR182: 4, AR196: 4, AR258: 4, AR281: 4, AR292: 4, AR219: 3, AR310: 3, AR260: 3, AR218: 3, |
| | | | | AR052: 3, AR284: 3, AR273: 2, AR256: 2, AR202: 2, AR055: 2, AR314: 2, AR259: 1, AR235: 1, AR206: 1, L0748: 4, L0774: 3, H0046: 2, L0662: 2, L0803: 2, L0666: 2, |
| | | | | L0749: 2, L3643: 1, H0728: 1, H0431: 1, H0318: 1, H0024: 1, S0318: 1, H0087: 1, S0344: 1, L0638: 1, L0637: 1, L0775: 1, L0659: 1, L0783: 1, L0663: 1, L2259: 1, H0521: 1, |
| | | | | H0522: 1, L0777: 1, L0731: 1, L0599: 1 and L0608: 1. |
| 41 | HDPSP54 | 744440 | 51 | AR263: 53, AR207: 53, AR214: 51, AR169: 41, AR224: 40, AR222: 38, AR223: 37, AR195: 36, AR235: 32, AR217: 31, AR212: 31, AR168: 30, AR172: 30, AR311: 29, |
| | | | | AR053: 28, AR192: 28, AR196: 28, AR171: 27, AR198: 27, AR213: 27, AR221: 27, AR161: 26, AR264: 26, AR252: 26, AR162: 25, AR170: 25, AR210: 25, AR245: 24, |
| | | | | AR033: 23, AR225: 23, AR216: 23, AR163: 22, AR089: 22, AR261: 22, AR215: 21, AR271: 21, AR177: 21, AR181: 21, AR104: 21, AR295: 20, AR218: 20, AR236: 19, |
| | | | | AR193: 19, AR191: 19, AR211: 19, AR197: 18, AR185: 18, AR055: 18, AR219: 18, AR201: 18, AR240: 18, AR165: 17, AR316: 17, AR166: 17, AR299: 17, AR164: 17, |
| | | | | AR060: 17, AR253: 17, AR174: 16, AR242: 16, AR288: 16, AR199: 16, AR205: 16, AR246: 15, AR282: 15, AR039: 15, AR238: 15, AR308: 15, AR229: 15, AR175: 14, |
| | | | | AR188: 14, AR285: 14, AR297: 14, AR254: 14, AR189: 14, AR232: 14, AR277: 13, AR300: 13, AR287: 13, AR243: 13, AR230: 13, AR312: 13, AR291: 13, AR286: 12, |
| | | | | AR204: 12, AR250: 12, AR226: 12, AR173: 12, AR200: 12, AR239: 12, AR176: 12, AR274: 11, AR296: 11, AR096: 11, AR309: 11, AR203: 11, AR231: 11, AR270: 11, |
| | | | | AR247: 11, AR293: 11, AR190: 11, AR283: 10, AR258: 10, AR267: 10, AR234: 10, AR289: 10, AR262: 10, AR178: 10, AR268: 10, AR227: 10, AR313: 10, AR180: 10, |
| | | | | AR237: 10, AR179: 9, AR257: 9, AR182: 9, AR269: 9, AR255: 9, AR233: 9, AR260: 9, AR061: 9, AR183: 9, AR290: 8, AR275: 8, AR272: 8, AR266: 8, AR294: 7, AR256: 7, |
| | | | | AR228: 6, L0740: 8, L0662: 3, L0659: 3, L0663: 3, S0422: 2, L0646: 2, L0766: 2, L0439: 2, L0779: 2, H0171: 1, S6024: 1, S0110: 1, S0360: 1, H0411: 1, H0455: 1, S0474: 1, |
| | | | | H0510: 1, S0438: 1, L0637: 1, L5565: 1, L0771: 1, L0773: 1, L0794: 1, L0804: 1, L0787: 1, L0665: 1, L0438: 1, H0521: 1, S0406: 1, L0754: 1, L0755: 1 and L0758: 1. |
| | HDPSP54 | 502472 | 213 | |
| 42 | HDPVH60 | 796865 | 52 | AR263: 12, AR265: 9, AR311: 8, AR312: 8, AR264: 7, AR308: 7, AR161: 7, AR162: 7, AR052: 7, AR163: 7, AR195: 7, AR212: 7, AR165: 6, AR197: 6, AR164: 6, AR053: 6, |
| | | | | AR242: 6, AR193: 6, AR166: 6, AR203: 6, AR245: 5, AR180: 5, AR191: 5, AR310: 5, AR096: 5, AR196: 5, AR287: 5, AR199: 5, AR188: 5, AR253: 4, AR213: 4, AR309: 4, |
| | | | | AR174: 4, AR262: 4, AR200: 4, AR257: 4, AR201: 4, AR190: 4, AR183: 4, AR288: 4, AR178: 4, AR239: 4, AR272: 4, AR236: 4, AR261: 4, AR204: 4, AR282: 4, AR255: 4, |
| | | | | AR228: 4, AR275: 4, AR176: 4, AR244: 4, AR060: 4, AR297: 3, AR189: 3, AR249: 3, AR172: 3, AR233: 3, AR179: 3, AR175: 3, AR207: 3, AR177: 3, AR295: 3, AR039: 3, |
| | | | | AR198: 3, AR229: 3, AR294: 3, AR173: 3, AR286: 3, AR254: 3, AR248: 3, AR230: 3, AR184: 3, AR227: 3, AR270: 3, AR293: 3, AR240: 3, AR182: 3, AR313: 3, AR246: 3, |
| | | | | AR258: 3, AR033: 2, AR234: 2, AR316: 2, AR274: 2, AR089: 2, AR267: 2, AR226: 2, AR185: 2, AR300: 2, AR269: 2, AR192: 2, AR285: 2, AR232: 2, AR299: 2, AR205: 2, |
| | | | | AR268: 2, AR247: 2, AR104: 2, AR237: 2, AR271: 2, AR221: 2, AR290: 2, AR061: 2, AR231: 2, AR181: 2, AR252: 2, AR260: 2, AR277: 2, AR281: 2, AR289: 2, AR243: 1, |
| | | | | AR266: 1, AR055: 1, AR291: 1, AR296: 1, AR168: 1, AR211: 1, AR217: 1, AR235: 1, AR280: 1, AR292: 1, AR251: 1, AR219: 1, AR194: 1, H0457: 6, H0436: 4, L0761: 3, |
| | | | | L0655: 3, L0749: 3, S0276: 3, H0716: 2, H0657: 2, H0492: 2, H0069: 2, H0050: 2, H0271: 2, L0764: 2, L0771: 2, L0766: 2, L0774: 2, L0775: 2, H0521: 2, L0751: 2, L0777: 2, |
| | | | | H0423: 2, S0114: 1, S0134: 1, H0650: 1, L0808: 1, H0254: 1, S0376: 1, S0360: 1, H0580: 1, H0600: 1, H0586: 1, H0587: 1, H0486: 1, |
| | | | | S0474: 1, H0416: 1, H0687: 1, H0039: 1, |
| | | | | H0606: 1, H0591: 1, H0040: 1, H0488: 1, H0641: 1, L0763: 1, L0794: 1, L0806: 1, L0661: 1, L0659: 1, L0665: 1, H0144: 1, H0697: 1, |
| | | | | S0380: 1, H0522: 1, H0576: 1, H0478: 1, |
| | | | | L0747: 1, L0779: 1, S0260: 1, L0599: 1, H0543: 1 and H0506: 1. |
| 43 | HDPWN93 | 992925 | 53 | AR313: 5, AR089: 5, AR207: 5, AR096: 5, AR219: 5, AR277: 4, AR299: 4, AR162: 4, AR161: 4, AR165: 4, AR274: 4, AR104: 4, AR193: 4, AR164: 4, AR240: 4, AR166: 4, |
| | | | | AR163: 4, AR264: 4, AR282: 4, AR250: 4, AR316: 4, AR218: 3, AR215: 3, AR185: 3, AR178: 3, AR196: 3, AR311: 3, AR216: 3, AR039: 3, AR300: 3, AR055: 3, AR225: 3, |
| | | | | AR245: 3, AR312: 3, AR060: 3, AR291: 3, AR195: 3, AR188: 3, AR198: 3, AR269: 2, AR257: 2, AR308: 2, AR285: 2, AR270: 2, AR297: 2, AR247: 2, AR288: 2, AR180: 2, |
| | | | | AR221: 2, AR223: 2, AR182: 2, AR266: 2, AR243: 2, AR201: 2, AR283: 2, AR213: 2, AR232: 2, AR200: 2, AR224: 2, AR212: 2, AR293: 2, AR173: 2, AR191: 2, AR262: 2, |
| | | | | AR053: 2, AR229: 2, AR189: 2, AR275: 2, AR181: 2, AR203: 2, AR237: 2, AR217: 2, AR226: 2, AR205: 2, AR268: 2, AR287: 2, AR214: 2, AR255: 2, AR171: 2, AR290: 2, |
| | | | | AR272: 2, AR286: 2, AR309: 2, AR174: 2, AR246: 2, AR271: 2, AR289: 2, AR227: 2, AR296: 2, AR238: 1, AR175: 1, AR231: 1, AR261: 1, AR256: 1, AR294: 1, AR179: 1, |
| | | | | AR199: 1, AR234: 1, AR190: 1, AR295: 1, AR233: 1, AR177: 1, AR033: 1, AR267: 1, AR239: 1, H0618: 17, H0253: 16, L0758: 7, L0659: 6, H0052: 5, L0439: 4, S0354: 3, |
| | | | | S0358: 3, H0046: 3, S0150: 3, L0794: 3, L0809: 3, L0666: 3, L0665: 3, S6024: 2, S0356: 2, S0442: 2, T0060: 2, H0424: 2, H0038: 2, H0063: 2, H0412: 2, L0771: 2, S0152: 2, |
| | | | | L0754: 2, L0747: 2, L0601: 2, H0543: 2, H0255: 1, H0589: 1, H0580: 1, S0045: 1, S0222: 1, H0409: 1, H0333: 1, L0021: 1, T0082: 1, H0706: 1, H0590: 1, S0010: 1, H0194: 1, |
| | | | | H0251: 1, H0309: 1, H0263: 1, H0597: 1, H0545: 1, T0010: 1, S0340: 1, H0622: 1, H0417: 1, H0030: 1, H0135: 1, H0616: 1, H0087: 1, |
| | | | | H0494: 1, H0131: 1, H0207: 1, H0646: 1, |
| | | | | L0763: 1, L0638: 1, L3905: 1, L0761: 1, L0800: 1, L0764: 1, L0768: 1, L0766: 1, L0803: 1, L0650: 1, L0540: 1, L0384: 1, L5622: 1, L0792: 1, L0663: 1, H0435: 1, H0648: 1, |
| | | | | H0672: 1, H0521: 1, S0044: 1, H0555: 1, L0743: 1, L0740: 1, L0759: 1, S0436: 1, H0423: 1 and H0506: 1. |
| | HDPWN93 | 887914 | 214 | |
| | HDPWN93 | 905983 | 215 | |
| 44 | HDQHD03 | 1309175 | 54 | AR206: 6, AR263: 4, AR244: 3, AR273: 3, AR310: 2, AR215: 2, AR250: 2, AR169: 2, AR243: 2, AR171: 2, AR282: 2, AR216: 2, AR253: 2, AR285: 2, AR247: 2, AR183: 2, |
| | | | | AR277: 2, AR060: 2, AR212: 1, AR217: 1, AR238: 1, AR312: 1, AR186: 1, AR271: 1, AR266: 1, AR055: 1, AR255: 1, AR262: 1, AR311: 1, AR289: 1, AR231: 1, AR296: 1, |
| | | | | AR257: 1, AR290: 1, AR204: 1, AR096: 1, AR089: 1, AR227: 1, L0766: 5, L0779: 2, T0082: 1 and L0807: 1. |
| | HDQHD03 | 834692 | 216 | |
| 45 | HE2EN04 | 545008 | 55 | AR309: 12, AR264: 11, AR308: 9, AR263: 9, AR311: 8, AR312: 6, AR210: 6, AR225: 6, AR207: 5, AR053: 5, AR245: 5, AR200: 5, |
| | | | | AR313: 4, AR272: 4, AR282: 4, AR217: 4, |
| | | | | AR271: 4, AR223: 4, AR201: 4, AR183: 4, AR212: 4, AR196: 4, AR193: 4, AR246: 4, AR270: 3, AR274: 3, AR203: 3, AR162: 3, AR161: 3, AR163: 3, AR267: 3, AR176: 3, |
| | | | | AR205: 3, AR195: 3, AR172: 3, AR261: 3, AR096: 3, AR165: 3, AR197: 3, AR164: 3, AR268: 2, AR218: 2, AR255: 2, AR177: 2, AR204: 2, AR188: 2, AR168: 2, AR199: 2, |
| | | | | AR175: 2, AR166: 2, AR316: 2, AR060: 2, AR216: 2, AR236: 2, AR089: 2, AR266: 2, AR288: 2, AR171: 2, AR213: 2, AR178: 2, AR228: 2, AR262: 2, AR290: 2, AR231: 2, |
| | | | | AR179: 2, AR233: 2, AR185: 2, AR239: 2, AR296: 2, AR229: 2, AR234: 2, AR182: 2, AR289: 2, AR285: 2, AR277: 1, AR224: 1, AR181: 1, AR293: 1, AR191: 1, AR237: 1, |
| | | | | AR227: 1, AR219: 1, AR286: 1, AR173: 1, AR291: 1, AR269: 1, AR295: 1, AR190: 1, AR258: 1, AR055: 1, AR294: 1, AR211: 1, AR061: 1, AR238: 1, AR252: 1, AR247: 1, |
| | | | | AR297: 1, AR283: 1, AR299: 1, AR214: 1, L0749: 5, L0662: 3, L0665: 3, H0144: 3, H0519: 3, S0418: 2, L0518: 2, L0663: 2, H0690: 2, |
| | | | | L0740: 2, L0779: 2, H0624: 1, H0170: 1, |
| | | | | T0002: 1, S0420: 1, S0360: 1, H0559: 1, H0581: 1, L0471: 1, H0628: 1, H0634: 1, H0616: 1, S0210: 1, L0598: 1, L0770: 1, L0769: 1, L0373: 1, L0372: 1, L0642: 1, L0764: 1, |
| | | | | L0768: 1, L0649: 1, L0381: 1, L0650: 1, L0806: 1, L0655: 1, L0657: 1, H0684: 1, S0152: 1, H0631: 1, L0751: 1, L0596: 1, S0011: 1 and H0677: 1. |
| 46 | HE8QV67 | 1050076 | 56 | AR104: 11, AR299: 9, AR089: 9, AR055: 9, AR219: 9, AR060: 8, AR218: 8, AR039: 7, AR283: 7, AR316: 7, AR282: 7, AR277: 7, AR313: 6, AR300: 6, AR240: 6, AR185: 6, |
| | | | | AR096: 6, L0748: 8, L0439: 8, S0404: 7, L0766: 6, H0144: 5, H0052: 4, L0769: 4, L0752: 4, L0758: 4, H0556: 3, H0024: 3, H0163: 3, T0041: 3, L0646: 3, L0768: 3, L0776: 3, |
| | | | | L0740: 3, H0624: 2, H0265: 2, S0444: 2, S0408: 2, S0046: 2, H0333: 2, H0486: 2, H0383: 2, L0770: 2, L0649: 2, L0659: 2, L0666: 2, S0374: 2, H0547: 2, H0436: 2, L0751: 2, |
| | | | | L0745: 2, L0747: 2, L0759: 2, L0597: 2, L0593: 2, H0171: 1, S0342: 1, H0657: 1, S0116: 1, H0384: 1, H0662: 1, S0442: 1, S0358: 1, H0735: 1, S0007: 1, S0045: 1, H0749: 1, |
| | | | | S0300: 1, S0278: 1, S0222: 1, H0013: 1, H0581: 1, H0421: 1, H0046: 1, H0009: 1, L0157: 1, H0620: 1, H0014: 1, H0051: 1, T0006: 1, |
| | | | | H0617: 1, S0036: 1, H0135: 1, H0038: 1, |
| | | | | S0038: 1, L0351: 1, S0440: 1, S0142: 1, H0529: 1, L0796: 1, L0772: 1, L0641: 1, L0642: 1, L0643: 1, L0764: 1, L0774: 1, L0775: 1, L0375: 1, L0651: 1, L0805: 1, L0657: 1, |
| | | | | L0383: 1, L0809: 1, L0663: 1, S0052: 1, L0352: 1, S0126: 1, H0689: 1, H0690: 1, H0670: 1, H0648: 1, S0378: 1, S0044: 1, L0744: 1, L0754: 1, L0756: 1, L0786: 1, L0779: 1, |
| | | | | L0777: 1, L0753: 1, L0731: 1, L0592: 1, L0599: 1, L0608: 1, L0595: 1, H0667: 1 and H0008: 1. |
| | HE8QV67 | 1050077 | 217 | |
| 47 | HE8UB86 | 834913 | 57 | AR266: 6, AR176: 5, AR183: 5, AR192: 5, AR182: 4, AR215: 4, AR181: 4, AR274: 4, AR055: 4, AR235: 4, AR269: 4, AR223: 4, AR217: 4, AR236: 4, AR228: 4, AR060: 4, |
| | | | | AR178: 3, AR224: 3, AR257: 3, AR165: 3, AR229: 3, AR270: 3, AR233: 3, AR168: 3, AR161: 3, AR268: 3, AR166: 3, AR162: 3, AR163: 3, AR237: 3, AR164: 3, AR214: 3, |
| | | | | AR253: 3, AR261: 3, AR267: 3, AR225: 3, AR179: 3, AR177: 3, AR293: 3, AR180: 3, AR296: 3, AR212: 3, AR247: 3, AR175: 3, AR191: 2, AR289: 2, AR238: 2, AR282: 2, |
| | | | | AR222: 2, AR231: 2, AR291: 2, AR294: 2, AR196: 2, AR039: 2, AR277: 2, AR262: 2, AR199: 2, AR245: 2, AR240: 2, AR255: 2, AR295: 2, AR288: 2, AR216: 2, AR297: 2, |
| | | | | AR089: 2, AR061: 2, AR200: 2, AR239: 2, AR174: 2, AR201: 2, AR309: 2, AR188: 2, AR190: 2, AR300: 2, AR203: 2, AR271: 2, AR230: 2, AR285: 2, AR234: 2, AR316: 2, |
| | | | | AR189: 2, AR299: 2, AR226: 2, AR185: 2, AR227: 2, AR286: 2, AR275: 2, AR193: 2, AR172: 2, AR096: 2, AR232: 2, AR104: 2, AR313: 2, AR221: 2, AR195: 2, AR290: 2, |
| | | | | AR283: 2, AR258: 1, AR287: 1, AR219: 1, AR264: 1, AR173: 1, AR312: 1, AR218: 1, AR210: 1, AR169: 1, H0030: 2, H0624: 1, H0013: 1, L0769: 1, L0803: 1 and L0438: 1. |
| 48 | HE9BK23 | 675382 | 58 | AR238: 18, AR226: 16, AR239: 12, AR232: 10, AR060: 9, AR237: 8, AR228: 8, AR055: 6, AR227: 6, AR231: 5, AR283: 4, AR197: 4, |
| | | | | AR229: 4, AR176: 4, AR282: 4, AR104: 4, |
| | | | | AR089: 4, AR230: 4, AR253: 3, AR233: 3, AR234: 3, AR205: 3, AR240: 3, AR185: 3, AR207: 3, AR204: 3, AR316: 3, AR096: 3, AR312: 3, AR264: 3, AR223: 3, AR182: 3, |
| | | | | AR245: 3, AR201: 3, AR299: 3, AR289: 2, AR218: 2, AR250: 2, AR246: 2, AR164: 2, AR300: 2, AR166: 2, AR271: 2, AR168: 2, AR275: 2, AR252: 2, AR257: 2, AR161: 2, |
| | | | | AR162: 2, AR039: 2, AR212: 2, AR163: 2, AR216: 2, AR225: 2, AR053: 2, AR269: 2, AR309: 2, AR277: 2, AR165: 2, AR268: 2, AR171: 2, AR313: 2, AR267: 2, AR190: 2, |
| | | | | AR175: 2, AR311: 2, AR254: 2, AR215: 2, AR291: 2, AR199: 2, AR247: 2, AR236: 2, AR266: 2, AR180: 2, AR198: 2, AR196: 2, AR183: 2, AR296: 2, AR033: 2, AR287: 2, |
| | | | | AR061: 2, AR270: 2, AR294: 1, AR308: 1, AR295: 1, AR193: 1, AR214: 1, AR262: 1, AR178: 1, AR261: 1, AR191: 1, AR181: 1, AR179: 1, AR219: 1, AR256: 1, AR297: 1, |
| | | | | AR274: 1, AR293: 1, AR290: 1, AR172: 1, AR195: 1, AR200: 1, AR203: 1, AR255: 1, AR189: 1, AR188: 1, AR243: 1, AR169: 1, AR285: 1, AR224: 1, AR173: 1, L0803: 10, |
| | | | | H0510: 4, H0741: 3, H0730: 2, L3388: 2, H0355: 2, S0438: 2, L0581: 2, H0722: 1, H0393: 1, H0574: 1, H0746: 1, H0014: 1, H0509: 1, |
| | | | | L0804: 1, L0790: 1, H0144: 1 and L0748: 1. |
| 49 | HEBBN36 | 486120 | 59 | AR197: 8, AR309: 6, AR055: 6, AR162: 5, AR161: 5, AR215: 5, AR163: 5, AR198: 5, AR246: 5, AR060: 5, AR176: 5, AR165: 4, AR166: 4, AR164: 4, AR178: 3, AR104: 3, |
| | | | | AR201: 3, AR282: 3, AR283: 3, AR229: 3, AR089: 3, AR033: 3, AR216: 3, AR183: 3, AR039: 3, AR228: 3, AR180: 3, AR274: 3, AR170: 3, AR181: 3, AR311: 3, AR233: 3, |
| | | | | AR177: 3, AR096: 2, AR207: 2, AR179: 2, AR312: 2, AR239: 2, AR061: 2, AR300: 2, AR182: 2, AR268: 2, AR185: 2, AR271: 2, AR237: 2, AR224: 2, AR296: 2, AR263: 2, |
| | | | | AR243: 2, AR270: 2, AR289: 2, AR316: 2, AR299: 2, AR272: 2, AR261: 2, AR226: 2, AR286: 2, AR204: 2, AR175: 2, AR193: 2, AR227: 2, AR173: 2, AR230: 2, AR212: 2, |
| | | | | AR294: 2, AR231: 2, AR189: 2, AR255: 2, AR200: 2, AR291: 2, AR205: 2, AR293: 2, AR225: 2, AR213: 1, AR313: 1, AR222: 1, AR287: 1, AR267: 1, AR190: 1, AR257: 1, |
| | | | | AR247: 1, AR264: 1, AR240: 1, AR290: 1, AR297: 1, AR218: 1, AR199: 1, AR232: 1, AR277: 1, AR196: 1, AR308: 1, S0007: 3, L0777: 3, L0754: 2, L0749: 2, H0599: 1, |
| | | | | H0328: 1, T0042: 1, L0804: 1, L0784: 1, L0805: 1, L0659: 1, L0791: 1, L0779: 1 and L0731: 1. |
| 50 | HEQCC55 | 1352368 | 60 | AR216: 11, AR217: 10, AR214: 9, AR207: 9, AR263: 8, AR195: 8, AR165: 8, AR253: 8, AR224: 8, AR242: 8, AR053: 8, |
| | | | | AR164: 8, AR163: 8, AR246: 8, AR161: 8, AR222: 8, |
| | | | | AR245: 8, AR166: 8, AR170: 8, AR162: 8, AR308: 7, AR197: 7, AR212: 7, AR309: 7, AR223: 7, AR312: 7, AR198: 7, AR311: 6, AR250: 6, AR254: 6, AR205: 6, AR243: 6, |
| | | | | AR213: 6, AR274: 6, AR168: 6, AR264: 6, AR193: 5, AR296: 5, AR201: 5, AR272: 5, AR238: 5, AR033: 5, AR275: 5, AR175: 5, AR282: 4, AR313: 4, AR221: 4, AR291: 4, |
| | | | | AR283: 4, AR225: 4, AR174: 4, AR235: 4, AR104: 4, AR261: 4, AR171: 4, AR277: 4, AR297: 4, AR288: 4, AR177: 4, AR300: 4, AR183: 4, AR295: 4, AR169: 4, AR316: 4, |
| | | | | AR192: 4, AR270: 4, AR181: 4, AR089: 4, AR266: 4, AR289: 3, AR269: 3, AR178: 3, AR226: 3, AR173: 3, AR172: 3, AR239: 3, AR268: 3, AR299: 3, AR290: 3, AR293: 3, |
| | | | | AR189: 3, AR196: 3, AR185: 3, AR231: 3, AR257: 3, AR240: 3, AR285: 3, AR247: 3, AR176: 3, AR039: 3, AR210: 3, AR271: 3, AR255: 3, AR191: 3, AR267: 3, AR204: 3, |
| | | | | AR182: 3, AR096: 3, AR262: 3, AR200: 3, AR179: 3, AR237: 3, AR227: 3, AR199: 3, AR286: 3, AR060: 3, AR234: 3, AR233: 3, AR232: 3, AR061: 2, AR190: 2, AR294: 2, |
| | | | | AR287: 2, AR258: 2, AR188: 2, AR229: 2, AR055: 2, AR230: 2, AR215: 2, AR228: 2, AR203: 2, AR236: 2, AR211: 2, AR219: 2, AR218: 1, AR256: 1, L0803: 5, L0755: 5, |
| | | | | L0666: 4, S0418: 3, H0059: 3, H0494: 3, S0420: 2, H0086: 2, H0551: 2, H0413: 2, L0763: 2, L3904: 2, L0646: 2, L0800: 2, L0775: 2, L0659: 2, L0809: 2, H0144: 2, H0435: 2, |
| | | | | H0670: 2, L0731: 2, S0342: 1, H0294: 1, S0180: 1, H0734: 1, S0046: 1, S0278: 1, H0437: 1, H0392: 1, H0544: 1, H0545: 1, L0471: 1, H0012: 1, H0375: 1, H0286: 1, S0250: 1, |
| | | | | H0039: 1, H0553: 1, H0628: 1, H0646: 1, L0769: 1, L5565: 1, L0761: 1, L0764: 1, L0773: 1, L0662: 1, L0649: 1, L0804: 1, L0774: 1, L0806: 1, L0653: 1, L0657: 1, L0512: 1, |
| | | | | L0789: 1, L0663: 1, S0406: 1, L0743: 1, L0754: 1, L0750: 1, L0780: 1, L0581: 1, L0603: 1 and H0665: 1. |
| | HEQCC55 | 884824 | 218 | |
| | HEQCC55 | 748227 | 219 | |
| 51 | HESAJ10 | 526013 | 61 | AR240: 38, AR104: 31, AR219: 27, AR282: 26, AR300: 23, AR039: 23, AR299: 22, AR089: 21, AR218: 19, AR096: 19, AR277: 19, AR055: 14, AR313: 13, AR185: 13, |
| | | | | AR060: 13, AR316: 11, AR283: 7, H0617: 16, H0545: 12, L0757: 8, S0358: 7, S0360: 7, L0747: 7, H0156: 5, H0546: 5, S0126: 5, L0731: 5, H0424: 4, H0181: 4, L0809: 4, |
| | | | | H0024: 3, H0087: 3, L0783: 3, H0672: 3, S3012: 3, S0212: 2, S0420: 2, H0734: 2, S0222: 2, H0497: 2, H0085: 2, H0530: 2, H0356: 2, H0606: 2, S0440: 2, L0769: 2, L0773: 2, |
| | | | | S0330: 2, S0406: 2, S3014: 2, S0028: 2, L0751: 2, L0754: 2, L0752: 2, L0588: 2, H0653: 2, S0194: 2, S0276: 2, H0716: 1, H0295: 1, H0661: 1, H0663: 1, S0442: 1, S0376: 1, |
| | | | | S0444: 1, S0410: 1, H0730: 1, H0735: 1, S0132: 1, H0549: 1, H0431: 1, H0370: 1, H0586: 1, H0333: 1, H0486: 1, H0318: 1, H0374: 1, |
| | | | | H0052: 1, H0251: 1, H0309: 1, H0597: 1, |
| | | | | H0086: 1, H0123: 1, H0081: 1, S0050: 1, H0051: 1, H0594: 1, H0271: 1, H0687: 1, S0338: 1, H0428: 1, H0033: 1, H0213: 1, H0405: 1, |
| | | | | H0628: 1, H0059: 1, L0564: 1, H0633: 1, |
| | | | | L0763: 1, L3904: 1, L0630: 1, L0364: 1, L0775: 1, L0776: 1, L0384: 1, L5623: 1, L2260: 1, S0374: 1, H0547: 1, H0519: 1, H0593: 1, L3210: 1, H0682: 1, H0658: 1, S0380: 1, |
| | | | | H0696: 1, S0044: 1, H0436: 1, S0392: 1, S0037: 1, S0032: 1, L0779: 1, S0434: 1, S0436: 1, L0361: 1, S0011: 1, H0423: 1, H0506: 1 and H0352: 1. |
| 52 | HETEU28 | 1018676 | 62 | AR104: 21, AR089: 15, AR055: 12, AR219: 12, AR218: 12, AR283: 10, AR282: 9, AR039: 9, AR096: 8, AR060: 7, AR316: 7, AR299: 6, AR313: 5, AR240: 5, AR300: 4, |
| | | | | AR185: 4, AR277: 4, AR309: 3, AR170: 3, AR253: 3, AR266: 3, AR169: 3, AR235: 3, AR196: 3, AR175: 3, AR264: 2, AR182: 2, AR223: 2, AR214: 2, AR163: 2, AR165: 2, |
| | | | | AR200: 2, AR172: 2, AR053: 2, AR164: 2, AR166: 2, AR274: 2, AR173: 2, AR269: 2, AR215: 2, AR257: 2, AR270: 2, AR262: 2, AR191: 2, AR258: 2, AR176: 2, AR246: 2, |
| | | | | AR174: 2, AR213: 2, AR290: 2, AR210: 2, AR297: 1, AR293: 1, AR225: 1, AR162: 1, AR238: 1, AR285: 1, AR268: 1, AR178: 1, AR168: 1, AR287: 1, AR255: 1, AR161: 1, |
| | | | | AR229: 1, AR233: 1, AR205: 1, AR189: 1, AR199: 1, AR179: 1, AR295: 1, AR222: 1, AR247: 1, AR294: 1, AR236: 1, AR171: 1, AR203: 1, S0027: 6, L0776: 5, L0659: 3, |
| | | | | S0406: 3, L0747: 3, S0420: 2, H0046: 2, H0622: 2, S0210: 2, L0662: 2, L0666: 2, S3014: 2, S0028: 2, L0748: 2, L0587: 2, S0442: 1, S0358: 1, H0329: 1, T0109: 1, H0013: 1, |
| | | | | H0178: 1, H0024: 1, T0023: 1, S0368: 1, H0040: 1, H0560: 1, L0598: 1, L0770: 1, L0761: 1, L0646: 1, L0765: 1, L0794: 1, L0806: 1, L0654: 1, L0807: 1, L0517: 1, L0526: 1, |
| | | | | L0783: 1, L0791: 1, H0693: 1, S0126: 1, S0044: 1, S0404: 1, L0741: 1, L0439: 1, L0757: 1 and L0758: 1. |
| | HETEU28 | 882328 | 220 | |
| 53 | HFABG18 | 847073 | 63 | AR292: 14, AR186: 12, AR241: 10, AR194: 9, AR273: 9, AR052: 8, AR202: 8, AR061: 8, AR282: 7, AR291: 7, AR206: 7, |
| | | | | AR298: 7, AR284: 7, AR274: 7, AR275: 6, AR295: 6, |
| | | | | AR184: 6, AR251: 6, AR244: 6, AR238: 5, AR204: 5, AR226: 5, AR310: 4, AR232: 4, AR286: 4, AR248: 4, AR296: 4, AR033: 4, AR289: 4, AR285: 4, AR266: 4, AR246: 4, |
| | | | | AR243: 4, AR055: 4, AR198: 4, AR312: 4, AR224: 4, AR309: 4, AR269: 4, AR283: 3, AR299: 3, AR227: 3, AR231: 3, AR237: 3, AR192: 3, AR265: 3, AR267: 3, AR268: 3, |
| | | | | AR253: 3, AR270: 3, AR259: 3, AR290: 3, AR053: 3, AR249: 3, AR193: 3, AR183: 3, AR300: 3, AR060: 3, AR182: 3, AR213: 3, AR233: 3, AR229: 3, AR172: 3, AR294: 3, |
| | | | | AR247: 3, AR216: 3, AR313: 3, AR225: 3, AR185: 3, AR293: 3, AR205: 3, AR218: 2, AR168: 2, AR277: 2, AR195: 2, AR089: 2, AR234: 2, AR261: 2, AR215: 2, AR271: 2, |
| | | | | AR219: 2, AR177: 2, AR235: 2, AR263: 2, AR171: 2, AR096: 2, AR316: 2, AR176: 2, AR245: 2, AR240: 2, AR175: 2, AR308: 2, AR272: 2, AR257: 2, AR163: 2, AR256: 2, |
| | | | | AR104: 1, AR165: 1, AR166: 1, AR315: 1, AR297: 1, AR169: 1, AR164: 1, AR039: 1, AR280: 1, AR255: 1, AR287: 1, L0743: 7, L0747: 6, L0758: 6, L0766: 5, L0666: 5, |
| | | | | L0754: 5, L0750: 5, L0662: 4, L0783: 4, L0665: 4, L0751: 4, L0777: 4, H0170: 3, S0132: 3, L0503: 3, L0500: 3, L0769: 3, L0774: 3, L0805: 3, L0809: 3, L0565: 3, L0749: 3, |
| | | | | L0757: 3, L0596: 3, S0360: 2, H0013: 2, H0024: 2, H0617: 2, H0673: 2, L0641: 2, L0773: 2, L0768: 2, L0649: 2, L0499: 2, L0375: 2, L0659: 2, L0664: 2, H0658: 2, L0744: 2, |
| | | | | L0748: 2, L0740: 2, L0745: 2, L0603: 2, H0265: 1, H0556: 1, S6024: 1, H0661: 1, H0662: 1, S0418: 1, T0008: 1, H0351: 1, S0222: 1, H0370: 1, T0039: 1, L0015: 1, S0280: 1, |
| | | | | H0575: 1, H0004: 1, H0618: 1, H0596: 1, H0231: 1, H0545: 1, H0009: 1, H0012: 1, S0388: 1, S0051: 1, H0292: 1, H0688: 1, H0644: 1, |
| | | | | L0055: 1, H0674: 1, H0124: 1, H0598: 1, |
| | | | | H0087: 1, S0440: 1, S0150: 1, S0142: 1, L0763: 1, L0770: 1, L0764: 1, L0771: 1, L0794: 1, L0650: 1, L0651: 1, L0378: 1, L0776: 1, L0655: 1, L0629: 1, L0657: 1, L0493: 1, |
| | | | | L0634: 1, L0528: 1, H0144: 1, H0547: 1, H0690: 1, H0682: 1, H0670: 1, S0328: 1, H0518: 1, H0436: 1, L0746: 1, L0756: 1, L0779: 1, L0780: 1, L0731: 1, H0445: 1, S0434: 1, |
| | | | | L0592: 1, L0595: 1, H0668: 1, S0194: 1, H0506: 1 and H0008: 1. |
| 54 | HFAMB72 | 490697 | 64 | AR282: 10, AR161: 8, AR162: 8, AR163: 8, AR198: 7, AR180: 5, AR176: 5, AR055: 5, AR060: 5, AR223: 5, AR165: 5, AR309: 5, AR164: 5, AR179: 5, AR290: 5, AR166: 5, |
| | | | | AR089: 4, AR300: 4, AR171: 4, AR104: 4, AR183: 4, AR242: 4, AR263: 4, AR245: 4, AR275: 4, AR039: 4, AR274: 4, AR271: 4, AR243: 4, AR173: 4, AR228: 3, AR240: 3, |
| | | | | AR181: 3, AR269: 3, AR264: 3, AR246: 3, AR247: 3, AR257: 3, AR168: 3, AR270: 3, AR291: 3, AR229: 3, AR293: 3, AR217: 3, AR177: 3, AR316: 3, AR185: 3, AR170: 3, |
| | | | | AR255: 3, AR216: 3, AR201: 3, AR204: 3, AR233: 3, AR189: 3, AR299: 3, AR239: 3, AR096: 3, AR178: 3, AR272: 3, AR311: 3, AR266: 3, AR193: 3, AR207: 3, AR236: 2, |
| | | | | AR250: 2, AR283: 2, AR174: 2, AR261: 2, AR226: 2, AR221: 2, AR182: 2, AR230: 2, AR268: 2, AR224: 2, AR197: 2, AR289: 2, AR231: 2, AR267: 2, AR237: 2, AR191: 2, |
| | | | | AR192: 2, AR238: 2, AR277: 2, AR312: 2, AR296: 2, AR288: 2, AR232: 2, AR297: 2, AR313: 2, AR287: 2, AR262: 2, AR286: 2, AR061: 2, AR175: 2, AR195: 2, AR190: 1, |
| | | | | AR033: 1, AR203: 1, AR227: 1, AR225: 1, AR234: 1, AR294: 1, AR169: 1, AR188: 1, AR253: 1, AR308: 1, AR213: 1, AR210: 1, L0662: 3, L0754: 3, H0717: 2, T0039: 2, |
| | | | | S0360: 1, S0045: 1, S6026: 1, H0549: 1, S0222: 1, H0427: 1, H0050: 1, L0769: 1, L0805: 1, L0776: 1, L0659: 1, L0789: 1, H0144: 1, |
| | | | | L0779: 1, L0777: 1, L0757: 1 and S0192: 1. |
| 55 | HFCCQ50 | 579993 | 65 | AR214: 58, AR274: 55, AR216: 54, AR217: 51, AR222: 50, AR245: 47, AR223: 47, AR272: 46, AR199: 45, AR224: 43, AR169: 42, AR168: 39, AR308: 38, AR225: 38, |
| | | | | AR205: 36, AR251: 35, AR212: 35, AR221: 35, AR264: 33, AR171: 33, AR165: 32, AR313: 31, AR213: 31, AR164: 31, AR162: 30, AR166: 30, AR210: 30, AR247: 30, |
| | | | | AR161: 30, AR172: 30, AR170: 29, AR215: 29, AR309: 29, AR163: 29, AR312: 28, AR273: 28, AR189: 28, AR188: 28, AR053: 28, AR178: 27, AR180: 27, AR173: 26, |
| | | | | AR236: 25, AR254: 25, AR183: 24, AR197: 23, AR250: 23, AR179: 22, AR263: 22, AR174: 22, AR246: 22, AR311: 22, AR190: 22, AR218: 22, AR310: 21, AR052: 20, |
| | | | | AR253: 20, AR195: 20, AR262: 19, AR211: 19, AR256: 19, AR300: 19, AR252: 18, AR242: 18, AR175: 18, AR299: 18, AR255: 18, AR297: 18, AR288: 17, AR271: 17, |
| | | | | AR240: 17, AR269: 17, AR219: 17, AR275: 17, AR089: 17, AR282: 17, AR270: 17, AR261: 16, AR243: 16, AR176: 16, AR257: 16, AR230: 16, AR096: 15, AR316: 15, |
| | | | | AR258: 15, AR181: 15, AR268: 15, AR260: 15, AR266: 15, AR293: 15, AR201: 15, AR265: 14, AR267: 14, AR290: 14, AR291: 14, AR193: 14, AR200: 13, AR191: 13, |
| | | | | AR203: 13, AR039: 13, AR296: 13, AR060: 12, AR196: 12, AR283: 12, AR289: 12, AR239: 12, AR229: 12, AR277: 12, AR198: 12, AR182: 12, AR177: 12, AR204: 11, |
| | | | | AR185: 11, AR287: 11, AR237: 11, AR295: 11, AR231: 11, AR244: 10, AR192: 10, AR248: 10, AR238: 10, AR280: 9, AR286: 9, AR315: 9, AR104: 9, AR285: 9, AR249: 9, |
| | | | | AR226: 9, AR294: 9, AR235: 8, AR234: 8, AR314: 8, AR033: 8, AR228: 8, AR186: 8, AR233: 7, AR292: 7, AR232: 7, AR241: 6, AR061: 6, AR207: 5, AR055: 5, AR227: 5, |
| | | | | AR259: 5, AR206: 4, AR281: 2, AR298: 2, AR184: 2, AR284: 1, AR194: 1, S0476: 1, L0803: 1, L0666: 1 and L0608: 1. |
| 56 | HFIIZ70 | 1043350 | 66 | AR235: 6, AR053: 6, AR313: 5, AR250: 5, AR169: 5, AR205: 4, AR161: 4, AR224: 4, AR309: 4, AR213: 4, AR165: 4, AR245: 4, AR264: 4, AR299: 4, AR089: 4, AR176: 4, |
| | | | | AR215: 4, AR164: 4, AR162: 4, AR166: 4, AR163: 4, AR196: 4, AR223: 4, AR282: 3, AR311: 3, AR261: 3, AR170: 3, AR180: 3, AR096: 3, AR252: 3, AR243: 3, AR207: 3, |
| | | | | AR183: 3, AR291: 3, AR212: 3, AR308: 3, AR193: 3, AR246: 3, AR312: 2, AR283: 2, AR296: 2, AR263: 2, AR286: 2, AR238: 2, AR060: 2, AR188: 2, AR191: 2, AR240: 2, |
| | | | | AR295: 2, AR297: 2, AR173: 2, AR217: 2, AR236: 2, AR316: 2, AR294: 2, AR270: 2, AR300: 2, AR257: 2, AR181: 2, AR185: 2, AR274: 2, AR225: 2, AR293: 2, AR285: 2, |
| | | | | AR287: 2, AR175: 2, AR229: 2, AR055: 2, AR226: 2, AR189: 2, AR174: 2, AR177: 2, AR262: 2, AR179: 2, AR247: 2, AR269: 2, AR104: 2, AR233: 2, AR172: 2, AR258: 2, |
| | | | | AR227: 2, AR232: 2, AR201: 2, AR171: 2, AR277: 2, AR275: 2, AR178: 2, AR271: 2, AR203: 2, AR210: 2, AR190: 2, AR182: 2, AR168: 1, AR228: 1, AR288: 1, AR234: 1, |
| | | | | AR231: 1, AR222: 1, AR199: 1, AR239: 1, AR033: 1, AR266: 1, AR268: 1, AR216: 1, H0617: 16, H0545: 12, L0757: 8, S0358: 7, S0360: 7, L0747: 7, H0156: 5, H0546: 5, |
| | | | | S0126: 5, L0731: 5, H0424: 4, H0181: 4, L0809: 4, H0024: 3, H0087: 3, L0783: 3, H0672: 3, S3012: 3, S0212: 2, S0420: 2, H0734: 2, S0222: 2, H0497: 2, H0085: 2, H0530: 2, |
| | | | | H0356: 2, H0606: 2, S0440: 2, L0769: 2, L0773: 2, S0330: 2, S0406: 2, S3014: 2, S0028: 2, L0751: 2, L0754: 2, L0752: 2, L0588: 2, H0653: 2, S0194: 2, S0276: 2, H0716: 1, |
| | | | | H0295: 1, H0661: 1, H0663: 1, S0442: 1, S0376: 1, S0444: 1, S0410: 1, H0730: 1, H0735: 1, S0132: 1, H0549: 1, H0431: 1, H0370: 1, |
| | | | | H0586: 1, H0333: 1, H0486: 1, H0318: 1, |
| | | | | H0374: 1, H0052: 1, H0251: 1, H0309: 1, H0597: 1, H0086: 1, H0123: 1, H0081: 1, S0050: 1, H0051: 1, H0594: 1, H0271: 1, H0687: 1, |
| | | | | S0338: 1, H0428: 1, H0033: 1, H0213: 1, |
| | | | | H0405: 1, H0628: 1, H0059: 1, L0564: 1, H0633: 1, L0763: 1, L3904: 1, L0630: 1, L0364: 1, L0775: 1, L0776: 1, L0384: 1, L5623: 1, L2260: 1, S0374: 1, H0547: 1, H0519: 1, |
| | | | | H0593: 1, L3210: 1, H0682: 1, H0658: 1, S0380: 1, H0696: 1, S0044: 1, H0436: 1, S0392: 1, S0037: 1, S0032: 1, L0779: 1, S0434: 1, S0436: 1, L0361: 1, S0011: 1, H0423: 1, |
| | | | | H0506: 1 and H0352: 1. |
| | HFIIZ70 | 906708 | 221 | |
| 57 | HFKET18 | 889515 | 67 | AR313: 6, AR180: 6, AR161: 5, AR242: 5, AR162: 5, AR163: 5, AR176: 5, AR178: 4, AR309: 4, AR165: 4, AR257: 4, AR272: 4, AR164: 4, AR166: 4, AR229: 4, AR183: 4, |
| | | | | AR300: 4, AR096: 4, AR270: 4, AR293: 3, AR299: 3, AR264: 3, AR089: 3, AR296: 3, AR182: 3, AR177: 3, AR268: 3, AR223: 3, AR195: 3, AR181: 3, AR266: 3, AR269: 3, |
| | | | | AR215: 3, AR238: 3, AR207: 3, AR179: 3, AR261: 3, AR196: 3, AR247: 3, AR262: 3, AR233: 3, AR246: 3, AR185: 2, AR250: 2, AR289: 2, AR175: 2, AR297: 2, AR199: 2, |
| | | | | AR237: 2, AR203: 2, AR267: 2, AR060: 2, AR231: 2, AR234: 2, AR291: 2, AR316: 2, AR287: 2, AR200: 2, AR285: 2, AR239: 2, AR173: 2, AR308: 2, AR171: 2, AR226: 2, |
| | | | | AR288: 2, AR228: 2, AR312: 2, AR236: 2, AR295: 2, AR240: 2, AR201: 2, AR191: 2, AR286: 2, AR277: 2, AR217: 2, AR174: 2, AR189: 2, AR290: 2, AR255: 2, AR258: 2, |
| | | | | AR274: 2, AR214: 2, AR172: 2, AR061: 1, AR294: 1, AR188: 1, AR053: 1, AR232: 1, AR170: 1, AR033: 1, AR190: 1, AR227: 1, AR104: 1, AR235: 1, AR055: 1, L0794: 9, |
| | | | | L0750: 5, L0717: 4, L0766: 4, L0439: 4, S0358: 3, H0620: 3, H0617: 3, L0769: 3, L0768: 3, L0438: 3, L0747: 3, S0360: 2, H0013: 2, H0674: 2, L0657: 2, L0740: 2, L0751: 2, |
| | | | | L0756: 2, L0758: 2, H0265: 1, H0556: 1, S0402: 1, H0583: 1, H0341: 1, H0255: 1, H0402: 1, S0418: 1, S0046: 1, H0619: 1, H0549: 1, |
| | | | | H0486: 1, H0618: 1, S0182: 1, H0318: 1, |
| | | | | H0183: 1, H0597: 1, H0544: 1, H0012: 1, H0107: 1, H0188: 1, H0644: 1, L0055: 1, H0087: 1, H0100: 1, H0529: 1, L0763: 1, L0761: 1, |
| | | | | L0646: 1, L0764: 1, L0771: 1, L0804: 1, |
| | | | | L0774: 1, L0809: 1, L0666: 1, L0663: 1, H0690: 1, H0660: 1, S0028: 1, L0731: 1, L0759: 1, H0445: 1, H0543: 1, S0456: 1 and H0352: 1. |
| 58 | HFLNB64 | 580829 | 68 | AR165: 7, AR164: 7, AR166: 7, AR215: 7, AR264: 6, AR170: 6, AR263: 6, AR309: 6, AR172: 5, AR308: 5, AR161: 5, AR162: 5, AR312: 5, AR163: 5, AR266: 5, AR196: 5, |
| | | | | AR225: 5, AR053: 5, AR313: 4, AR096: 4, AR269: 4, AR175: 4, AR181: 4, AR200: 4, AR173: 4, AR252: 4, AR188: 4, AR272: 4, AR174: 4, AR219: 4, AR275: 4, AR179: 4, |
| | | | | AR183: 4, AR282: 4, AR240: 4, AR294: 4, AR169: 4, AR257: 4, AR295: 3, AR212: 3, AR236: 3, AR288: 3, AR199: 3, AR218: 3, AR191: 3, AR216: 3, AR089: 3, AR261: 3, |
| | | | | AR182: 3, AR180: 3, AR290: 3, AR231: 3, AR255: 3, AR262: 3, AR287: 3, AR253: 3, AR285: 3, AR311: 3, AR316: 3, AR233: 3, AR237: 3, AR177: 3, AR270: 3, AR291: 3, |
| | | | | AR189: 3, AR176: 3, AR299: 3, AR228: 3, AR267: 3, AR268: 3, AR296: 3, AR190: 3, AR258: 3, AR210: 3, AR247: 3, AR286: 3, AR229: 3, AR293: 3, AR256: 3, AR239: 2, |
| | | | | AR274: 2, AR234: 2, AR289: 2, AR223: 2, AR203: 2, AR238: 2, AR300: 2, AR297: 2, AR060: 2, AR104: 2, AR061: 2, AR207: 2, AR230: 2, AR214: 2, AR221: 2, AR211: 2, |
| | | | | AR171: 2, AR250: 2, AR226: 2, AR185: 2, AR224: 2, AR178: 2, AR217: 2, AR232: 2, AR055: 2, AR222: 2, AR168: 2, AR260: 2, AR277: 2, AR033: 2, AR283: 1, AR227: 1, |
| | | | | AR193: 1, AR195: 1, AR205: 1, S6028: 3, H0591: 3, L0805: 3, H0412: 2, S0422: 2, L0766: 2, L0438: 2, L0745: 2, L0747: 2, H0171: 1, |
| | | | | S0218: 1, S0045: 1, H0357: 1, H0250: 1, |
| | | | | H0635: 1, H0253: 1, H0194: 1, H0251: 1, H0009: 1, S0023: 1, S0003: 1, H0674: 1, H0598: 1, H0090: 1, H0264: 1, H0561: 1, L0598: 1, |
| | | | | L0770: 1, L0794: 1, L0803: 1, L0774: 1, |
| | | | | L0542: 1, L0809: 1, L0789: 1, L0792: 1, H0547: 1, H0696: 1, H0576: 1, S0206: 1, L0777: 1, L0780: 1, L0758: 1, L0759: 1, S0436: 1, H0136: 1, H0543: 1 and L2357: 1. |
| 59 | HFOXA73 | 850699 | 69 | AR264: 3, AR197: 3, AR274: 3, AR168: 2, AR291: 2, AR205: 2, AR283: 2, AR162: 2, AR163: 1, AR224: 1, AR161: 1, AR230: 1, AR240: 1, AR266: 1, AR190: 1, AR263: 1, |
| | | | | AR191: 1, AR277: 1, AR178: 1, AR217: 1, AR257: 1, AR182: 1, AR295: 1, S0276: 1 |
| | HFOXA73 | 532079 | 222 | |
| 60 | HFPAC12 | 589522 | 70 | AR274: 3, AR225: 2, AR178: 2, AR217: 2, AR205: 2, AR213: 2, AR182: 2, AR311: 1, AR289: 1, AR197: 1, L0439: 6, S0222: 4, H0438: 2, S0049: 2, L0777: 2, L0731: 2, |
| | | | | L0757: 2, S0140: 1, S6016: 1, H0599: 1, S0346: 1, S6028: 1, S0214: 1, S0036: 1, H0040: 1, S0144: 1, S0344: 1, L0769: 1, L0800: 1, L0794: 1, L0438: 1, S0044: 1, L0742: 1, |
| | | | | L0747: 1 and L0759: 1. |
| 61 | HFPAO71 | 629193 | 71 | AR061: 490, AR273: 461, AR232: 455, AR237: 432, AR238: 424, AR227: 414, AR226: 343, AR241: 311, AR186: 304, AR274: 285, AR244: 270, AR206: 269, AR194: 260, |
| | | | | AR192: 197, AR271: 181, AR243: 173, AR052: 167, AR198: 167, AR231: 163, AR202: 162, AR275: 157, AR204: 152, AR310: 151, AR292: 150, AR205: 148, AR259: 147, |
| | | | | AR229: 136, AR312: 132, AR219: 132, AR185: 132, AR233: 128, AR248: 123, AR249: 122, AR039: 122, AR251: 122, AR053: 114, AR213: 113, AR033: 112, AR177: 108, |
| | | | | AR314: 108, AR293: 105, AR265: 104, AR246: 99, AR234: 98, AR096: 96, AR218: 96, AR280: 93, AR309: 93, AR300: 92, AR055: 91, AR282: 90, AR294: 90, AR184: 90, |
| | | | | AR313: 89, AR104: 89, AR175: 88, AR299: 86, AR281: 84, AR315: 83, AR179: 80, AR263: 79, AR060: 78, AR253: 77, AR256: 74, AR267: 72, AR247: 71, AR316: 66, |
| | | | | AR295: 66, AR298: 65, AR284: 64, AR183: 63, AR089: 63, AR240: 60, AR283: 57, AR277: 51, AR290: 49, AR258: 42, AR285: 41, AR269: 41, AR268: 39, AR286: 38, |
| | | | | AR296: 36, AR289: 35, AR182: 34, AR270: 32, AR266: 31, AR291: 24, AR176: 11, AR161: 9, AR162: 9, AR163: 9, AR264: 9, AR215: 9, AR197: 8, AR225: 8, AR201: 8, |
| | | | | AR193: 8, AR181: 7, AR235: 7, AR236: 7, AR252: 7, AR165: 7, AR178: 7, AR245: 7, AR228: 7, AR180: 7, AR254: 7, AR261: 7, AR164: 7, AR207: 6, AR223: 6, AR166: 6, |
| | | | | AR239: 6, AR214: 6, AR216: 6, AR250: 6, AR224: 6, AR168: 6, AR195: 6, AR217: 6, AR287: 6, AR288: 6, AR221: 5, AR242: 5, AR173: 5, AR257: 5, AR222: 5, AR196: 5, |
| | | | | AR297: 5, AR174: 5, AR169: 5, AR272: 5, AR308: 5, AR200: 5, AR170: 5, AR171: 5, AR212: 4, AR262: 4, AR191: 4, AR255: 4, AR210: 4, AR189: 4, AR311: 4, AR230: 4, |
| | | | | AR172: 4, AR188: 4, AR203: 4, AR199: 3, AR190: 3, AR211: 3, AR260: 2, L0748: 9, L0749: 5, S0360: 4, L0803: 4, L0779: 4, L0777: 4, |
| | | | | H0529: 3, L0747: 3, L0758: 3, H0657: 2, |
| | | | | S0354: 2, H0637: 2, S6016: 2, H0486: 2, H0615: 2, H0553: 2, S0422: 2, L0646: 2, L0766: 2, L0519: 2, L0666: 2, L0665: 2, H0436: 2, L0754: 2, L0750: 2, H0716: 1, H0580: 1, |
| | | | | S0007: 1, H0415: 1, H0013: 1, H0069: 1, H0427: 1, S0280: 1, H0156: 1, H0118: 1, S0346: 1, H0581: 1, T0103: 1, H0050: 1, L0471: 1, |
| | | | | H0014: 1, S0214: 1, H0328: 1, H0628: 1, |
| | | | | H0135: 1, H0551: 1, S0440: 1, L0662: 1, L0794: 1, L0650: 1, L0775: 1, L0805: 1, L0776: 1, L0655: 1, L0606: 1, L0783: 1, L0809: 1, L0792: 1, S0374: 1, H0693: 1, H0547: 1, |
| | | | | H0658: 1, L0745: 1, L0746: 1, L0780: 1, L0752: 1, L0731: 1, L0757: 1, L0485: 1 and H0422: 1. |
| 62 | HFPCX36 | 526635 | 72 | AR207: 23, AR185: 7, AR282: 6, AR242: 5, AR246: 4, AR215: 4, AR096: 4, AR060: 3, AR240: 3, AR224: 3, AR225: 2, AR205: 2, AR221: 2, AR222: 2, AR169: 2, AR170: 2, |
| | | | | AR183: 2, AR089: 2, AR172: 1, AR217: 1, AR214: 1, AR291: 1, AR296: 1, AR198: 1, S0222: 1 |
| 63 | HFPCX64 | 1309796 | 73 | AR254: 65, AR250: 61, AR253: 59, AR053: 38, AR039: 33, AR313: 33, AR210: 31, AR178: 31, AR252: 31, AR289: 31, AR286: 30, AR211: 29, AR262: 28, AR309: 28, |
| | | | | AR258: 28, AR293: 28, AR257: 28, AR260: 28, AR198: 27, AR196: 27, AR312: 27, AR240: 26, AR183: 26, AR266: 26, AR175: 26, AR256: 25, AR216: 25, AR190: 25, |
| | | | | AR189: 25, AR199: 25, AR203: 25, AR294: 24, AR191: 24, AR188: 24, AR172: 24, AR176: 24, AR177: 24, AR269: 24, AR264: 24, AR246: 24, AR270: 23, AR218: 23, |
| | | | | AR180: 23, AR173: 23, AR096: 23, AR212: 23, AR217: 23, AR268: 22, AR213: 22, AR290: 22, AR195: 22, AR285: 22, AR297: 22, AR192: 22, AR181: 21, AR200: 21, |
| | | | | AR287: 21, AR179: 21, AR223: 21, AR247: 21, AR291: 21, AR193: 20, AR182: 20, AR229: 20, AR089: 20, AR231: 20, AR300: 20, AR207: 20, AR299: 19, AR255: 19, |
| | | | | AR245: 19, AR174: 19, AR236: 18, AR224: 18, AR295: 18, AR204: 18, AR201: 18, AR233: 18, AR271: 18, AR197: 18, AR221: 18, AR274: 18, AR288: 18, AR214: 17, |
| | | | | AR169: 17, AR267: 17, AR316: 17, AR238: 17, AR225: 17, AR219: 17, AR170: 17, AR168: 17, AR234: 17, AR275: 17, AR243: 16, AR171: 16, AR205: 16, AR308: 16, |
| | | | | AR222: 16, AR272: 16, AR230: 16, AR242: 15, AR263: 15, AR033: 15, AR296: 15, AR185: 15, AR261: 15, AR237: 15, AR311: 15, AR227: 14, AR239: 14, AR226: 14, |
| | | | | AR235: 13, AR228: 13, AR215: 13, AR161: 12, AR162: 12, AR060: 12, AR283: 12, AR163: 12, AR232: 12, AR165: 11, AR061: 11, AR164: 11, AR282: 10, AR166: 10, |
| | | | | AR277: 10, AR104: 9, AR055: 9, S0222: 1, H0244: 1, H0052: 1 and L0764: 1. |
| | HFPCX64 | 877637 | 223 | |
| | HFPCX64 | 638851 | 224 | |
| | HFPCX64 | 514187 | 225 | |
| 64 | HFTBM50 | 545012 | 74 | AR300: 4, AR104: 4, AR240: 4, AR277: 3, AR060: 3, AR185: 3, AR055: 3, AR299: 2, AR316: 2, AR282: 2, AR219: 2, AR089: 2, AR283: 2, AR218: 2, AR096: 2, AR039: 2, |
| | | | | AR313: 1, L0439: 6, L0731: 4, L0769: 2, L0666: 2, S0432: 2, S0206: 2, L0751: 2, L0777: 2, L0759: 2, L0591: 2, H0341: 1, H0661: 1, S0408: 1, H0601: 1, H0497: 1, H0123: 1, |
| | | | | L0471: 1, H0051: 1, H0252: 1, H0673: 1, H0616: 1, H0551: 1, H0646: 1, S0422: 1, L0372: 1, L0771: 1, L0773: 1, L0768: 1, L0775: 1, L0375: 1, L0527: 1, L0664: 1, L0665: 1, |
| | | | | S0374: 1, H0519: 1, H0659: 1, H0521: 1, H0522: 1, L0747: 1, L0749: 1, L0755: 1, L0758: 1, S0031: 1, L0683: 1, L0590: 1 and L0595: 1. |
| 65 | HFXDJ75 | 626114 | 75 | AR055: 15, AR060: 14, AR299: 8, AR089: 7, AR283: 7, AR104: 7, AR185: 7, AR096: 6, AR277: 5, AR300: 5, AR282: 5, |
| | | | | AR316: 5, AR039: 5, AR218: 3, AR240: 3, AR169: 3, |
| | | | | AR217: 3, AR178: 3, AR266: 2, AR267: 2, AR313: 2, AR309: 2, AR221: 2, AR053: 2, AR197: 2, AR257: 2, AR219: 2, AR177: 2, AR288: 2, AR182: 2, AR228: 2, AR201: 2, |
| | | | | AR180: 2, AR237: 2, AR286: 2, AR176: 2, AR170: 2, AR296: 2, AR238: 2, AR263: 2, AR247: 2, AR162: 2, AR246: 2, AR274: 2, AR268: 2, AR255: 2, AR236: 2, AR161: 2, |
| | | | | AR233: 2, AR289: 2, AR293: 2, AR163: 2, AR229: 2, AR191: 2, AR213: 2, AR239: 2, AR171: 2, AR227: 1, AR188: 1, AR165: 1, AR231: 1, AR294: 1, AR164: 1, AR190: 1, |
| | | | | AR179: 1, AR181: 1, AR291: 1, AR166: 1, AR196: 1, AR290: 1, AR189: 1, AR210: 1, AR225: 1, AR261: 1, AR193: 1, AR175: 1, AR173: 1, AR235: 1, AR174: 1, AR230: 1, |
| | | | | AR200: 1, AR297: 1, AR270: 1, AR192: 1, S0001: 2 |
| 66 | HFXJU68 | 1352218 | 76 | AR182: 8, AR176: 8, AR309: 7, AR228: 7, AR269: 7, AR267: 6, AR229: 6, AR268: 6, AR181: 6, AR266: 6, AR178: 6, AR233: 6, AR197: 6, AR270: 6, AR180: 6, AR201: 6, |
| | | | | AR162: 6, AR161: 6, AR163: 5, AR168: 5, AR204: 5, AR257: 5, AR261: 5, AR177: 5, AR207: 5, AR165: 5, AR193: 5, AR236: 5, AR271: 5, AR293: 5, AR238: 5, AR164: 5, |
| | | | | AR239: 5, AR225: 5, AR166: 5, AR061: 5, AR237: 5, AR289: 5, AR226: 5, AR055: 5, AR183: 5, AR291: 4, AR060: 4, AR255: 4, AR089: 4, AR224: 4, AR179: 4, AR175: 4, |
| | | | | AR296: 4, AR214: 4, AR264: 4, AR231: 4, AR300: 4, AR262: 4, AR286: 4, AR312: 4, AR252: 4, AR272: 4, AR053: 4, AR274: 4, AR316: 4, AR287: 4, AR247: 4, AR253: 4, |
| | | | | AR230: 4, AR227: 4, AR198: 3, AR290: 3, AR039: 3, AR173: 3, AR299: 3, AR242: 3, AR294: 3, AR096: 3, AR295: 3, AR234: 3, AR033: 3, AR222: 3, AR216: 3, AR213: 3, |
| | | | | AR235: 3, AR191: 3, AR288: 3, AR196: 3, AR205: 3, AR174: 3, AR282: 3, AR185: 3, AR192: 3, AR195: 3, AR232: 3, AR240: 3, AR190: 3, AR283: 3, AR285: 3, AR246: 3, |
| | | | | AR203: 2, AR172: 2, AR277: 2, AR189: 2, AR308: 2, AR297: 2, AR188: 2, AR199: 2, AR200: 2, AR104: 2, AR311: 2, AR258: 2, AR171: 2, AR256: 2, AR223: 2, AR212: 2, |
| | | | | AR210: 2, AR260: 2, AR211: 2, AR275: 2, AR313: 2, AR221: 1, AR219: 1, AR245: 1, S0282: 1, H0581: 1 and H0423: 1. |
| | HFXJU68 | 570855 | 226 | |
| 67 | HGBIB74 | 837220 | 77 | AR214: 16, AR216: 13, AR217: 11, AR215: 9, AR161: 9, AR162: 9, AR163: 9, AR176: 8, AR250: 8, AR165: 8, AR178: 7, |
| | | | | AR164: 7, AR170: 7, AR196: 7, AR166: 7, AR181: 7, |
| | | | | AR228: 6, AR272: 6, AR197: 6, AR269: 6, AR309: 5, AR264: 5, AR089: 5, AR282: 5, AR175: 5, AR182: 5, AR248: 5, AR177: 5, AR270: 5, AR229: 5, AR223: 5, AR060: 5, |
| | | | | AR268: 5, AR239: 5, AR195: 5, AR173: 5, AR183: 5, AR238: 4, AR245: 4, AR211: 4, AR172: 4, AR180: 4, AR174: 4, AR168: 4, AR201: 4, AR190: 4, AR210: 4, AR104: 4, |
| | | | | AR265: 4, AR222: 4, AR247: 4, AR231: 4, AR275: 4, AR291: 4, AR179: 4, AR207: 4, AR203: 4, AR284: 4, AR308: 4, AR267: 4, AR061: 4, AR237: 4, AR233: 4, AR169: 4, |
| | | | | AR189: 4, AR266: 4, AR312: 4, AR230: 4, AR200: 4, AR316: 4, AR185: 4, AR218: 4, AR299: 4, AR191: 4, AR225: 4, AR226: 3, AR240: 3, AR290: 3, AR212: 3, AR096: 3, |
| | | | | AR188: 3, AR241: 3, AR271: 3, AR236: 3, AR205: 3, AR202: 3, AR311: 3, AR254: 3, AR274: 3, AR193: 3, AR055: 3, AR232: 3, AR227: 3, AR199: 3, AR255: 3, AR251: 3, |
| | | | | AR053: 3, AR252: 3, AR033: 3, AR052: 3, AR313: 3, AR192: 3, AR263: 3, AR295: 3, AR287: 3, AR298: 3, AR243: 3, AR234: 3, AR213: 3, AR310: 3, AR289: 3, AR219: 3, |
| | | | | AR224: 3, AR285: 3, AR286: 3, AR300: 3, AR293: 3, AR221: 2, AR246: 2, AR235: 2, AR261: 2, AR260: 2, AR258: 2, AR171: 2, AR292: 2, AR296: 2, AR294: 2, AR257: 2, |
| | | | | AR039: 2, AR198: 2, AR253: 2, AR288: 2, AR297: 2, AR277: 2, AR283: 2, AR204: 2, AR256: 2, AR262: 2, AR242: 1, AR186: 1, AR194: 1, H0253: 7, H0618: 6, H0556: 2, |
| | | | | S0356: 2, H0373: 2, H0522: 2, L0758: 2, L0603: 2, S0001: 1, S0278: 1, H0586: 1, H0050: 1, H0014: 1, H0644: 1, S0036: 1, H0038: 1, H0494: 1, H0625: 1, S0294: 1, L0769: 1, |
| | | | | H0435: 1 and H0521: 1. |
| | HGBIB74 | 838602 | 227 | |
| | HGBIB74 | 899864 | 228 | |
| 68 | HHEMA75 | 494099 | 78 | AR245: 10, AR207: 7, AR197: 7, AR242: 6, AR169: 6, AR282: 6, AR221: 6, AR243: 6, AR195: 5, AR224: 5, AR309: 5, AR198: 5, AR089: 5, AR171: 5, AR201: 5, AR250: 5, |
| | | | | AR165: 5, AR311: 5, AR164: 5, AR039: 5, AR214: 5, AR246: 5, AR216: 5, AR180: 4, AR263: 4, AR313: 4, AR168: 4, AR166: 4, AR225: 4, AR053: 4, AR222: 4, AR205: 4, |
| | | | | AR170: 4, AR253: 4, AR283: 4, AR161: 4, AR252: 4, AR299: 4, AR254: 4, AR193: 4, AR162: 4, AR172: 4, AR271: 3, AR235: 3, AR192: 3, AR196: 3, AR274: 3, AR163: 3, |
| | | | | AR223: 3, AR295: 3, AR312: 3, AR060: 3, AR264: 3, AR177: 3, AR288: 3, AR272: 3, AR261: 3, AR316: 3, AR178: 3, AR308: 3, AR257: 3, AR217: 3, AR183: 3, AR175: 3, |
| | | | | AR291: 3, AR188: 3, AR285: 3, AR191: 3, AR174: 3, AR236: 3, AR212: 3, AR286: 2, AR182: 2, AR238: 2, AR190: 2, AR213: 2, AR237: 2, AR189: 2, AR227: 2, AR293: 2, |
| | | | | AR185: 2, AR173: 2, AR275: 2, AR294: 2, AR230: 2, AR229: 2, AR200: 2, AR226: 2, AR204: 2, AR266: 2, AR289: 2, AR181: 2, AR268: 2, AR033: 2, AR300: 2, AR247: 2, |
| | | | | AR277: 2, AR287: 2, AR255: 2, AR262: 2, AR258: 2, AR239: 2, AR199: 2, AR179: 2, AR296: 2, AR176: 2, AR240: 2, AR211: 2, AR270: 2, AR290: 2, AR218: 2, AR231: 2, |
| | | | | AR096: 2, AR210: 2, AR232: 2, AR233: 2, AR061: 1, AR297: 1, AR055: 1, AR228: 1, AR203: 1, AR215: 1, AR234: 1, AR219: 1, AR104: 1, AR267: 1, AR260: 1, AR256: 1, |
| | | | | H0663: 1, H0052: 1, H0591: 1, H0264: 1, H0144: 1, S0126: 1, H0521: 1, L0758: 1, L0759: 1 and H0543: 1. |
| 69 | HHENK42 | 493724 | 79 | AR180: 6, AR165: 5, AR245: 5, AR164: 5, AR204: 5, AR039: 5, AR166: 5, AR313: 5, AR216: 5, AR242: 5, AR183: 4, AR089: 4, AR275: 4, AR178: 4, AR173: 4, AR163: 4, |
| | | | | AR175: 4, AR096: 4, AR269: 4, AR162: 3, AR201: 3, AR181: 3, AR266: 3, AR270: 3, AR182: 3, AR282: 3, AR197: 3, AR225: 3, AR185: 3, AR300: 3, AR053: 3, AR263: 3, |
| | | | | AR243: 2, AR252: 2, AR312: 2, AR221: 2, AR274: 2, AR237: 2, AR268: 2, AR271: 2, AR267: 2, AR193: 2, AR247: 2, AR195: 2, AR161: 2, AR179: 2, AR234: 2, AR277: 2, |
| | | | | AR174: 2, AR299: 2, AR060: 2, AR316: 2, AR233: 2, AR308: 2, AR224: 2, AR255: 2, AR240: 1, AR286: 1, AR288: 1, AR236: 1, AR264: 1, AR176: 1, AR226: 1, AR239: 1, |
| | | | | AR293: 1, AR169: 1, AR033: 1, AR192: 1, H0543: 1 |
| 70 | HHEPM33 | 877639 | 80 | AR263: 38, AR207: 37, AR311: 31, AR264: 30, AR212: 29, AR195: 27, AR309: 27, AR308: 26, AR165: 26, AR164: 25, AR053: 24, AR166: 24, AR213: 24, AR161: 23, |
| | | | | AR162: 23, AR192: 23, AR198: 22, AR163: 22, AR245: 22, AR246: 22, AR312: 21, AR089: 21, AR271: 21, AR205: 21, AR223: 20, AR277: 20, AR214: 19, AR193: 19, |
| | | | | AR197: 19, AR224: 19, AR274: 18, AR169: 18, AR282: 18, AR222: 18, AR252: 18, AR242: 17, AR217: 17, AR283: 17, AR240: 16, AR039: 16, AR216: 16, AR275: 15, |
| | | | | AR215: 15, AR235: 15, AR172: 15, AR104: 15, AR201: 15, AR168: 15, AR171: 14, AR060: 14, AR096: 14, AR170: 14, AR225: 14, AR261: 14, AR313: 14, AR243: 14, |
| | | | | AR033: 14, AR253: 14, AR055: 13, AR316: 13, AR272: 13, AR204: 12, AR250: 12, AR221: 12, AR185: 12, AR219: 12, AR295: 12, AR254: 11, AR288: 11, AR291: 11, |
| | | | | AR247: 11, AR297: 11, AR299: 11, AR287: 10, AR286: 10, AR236: 10, AR285: 10, AR300: 9, AR177: 9, AR210: 9, AR196: 9, AR296: 8, AR176: 8, AR218: 8, AR211: 8, |
| | | | | AR226: 7, AR293: 7, AR289: 7, AR266: 7, AR258: 7, AR181: 7, AR199: 7, AR174: 7, AR262: 7, AR191: 7, AR061: 6, AR257: 6, AR238: 6, AR173: 6, AR178: 6, AR200: 6, |
| | | | | AR175: 6, AR232: 6, AR270: 6, AR188: 6, AR294: 6, AR269: 6, AR255: 6, AR256: 6, AR182: 6, AR260: 5, AR183: 5, AR239: 5, AR229: 5, AR227: 5, AR189: 5, AR290: 5, |
| | | | | AR231: 5, AR234: 5, AR179: 5, AR180: 5, AR237: 4, AR190: 4, AR203: 4, AR268: 4, AR233: 4, AR267: 4, AR230: 4, AR228: 3, L0777: 9, H0617: 5, S0418: 3, H0618: 3, |
| | | | | H0556: 2, H0489: 2, H0253: 2, H0560: 2, L0770: 2, L0803: 2, L0789: 2, S0328: 2, H0436: 2, H0444: 2, H0543: 2, H0265: 1, H0685: 1, |
| | | | | S0218: 1, H0657: 1, S0116: 1, H0484: 1, |
| | | | | S0420: 1, S0356: 1, S0354: 1, S0358: 1, S0444: 1, S0360: 1, H0637: 1, L0103: 1, S0007: 1, H0441: 1, H0559: 1, H0486: 1, H0599: 1, H0042: 1, H0575: 1, H0052: 1, H0597: 1, |
| | | | | H0545: 1, H0373: 1, H0594: 1, H0266: 1, T0023: 1, H0553: 1, H0063: 1, H0551: 1, H0100: 1, H0646: 1, H0529: 1, L0371: 1, L0662: 1, |
| | | | | L0766: 1, L0804: 1, L0774: 1, L0378: 1, |
| | | | | L0806: 1, L0805: 1, L0655: 1, L0659: 1, L0809: 1, L0663: 1, H0698: 1, H0547: 1, S3012: 1, S0028: 1, L0731: 1, S0436: 1, S0192: 1, H0542: 1 and H0352: 1. |
| 71 | HHEPT60 | 463027 | 81 | AR309: 4, AR170: 3, AR215: 3, AR192: 3, AR178: 2, AR264: 2, AR245: 2, AR239: 2, AR282: 2, AR165: 2, AR271: 2, |
| | | | | AR240: 2, AR166: 2, AR274: 2, AR222: 2, AR162: 2, |
| | | | | AR164: 2, AR272: 2, AR089: 2, AR213: 1, AR312: 1, AR033: 1, AR161: 1, AR201: 1, AR224: 1, AR275: 1, AR246: 1, AR217: 1, AR195: 1, AR297: 1, AR163: 1, AR193: 1, |
| | | | | AR060: 1, AR205: 1, AR287: 1, AR228: 1, AR257: 1, AR181: 1, AR196: 1, AR267: 1, AR291: 1, AR216: 1, AR290: 1, AR295: 1, AR211: 1, AR219: 1 |
| 72 | HHFHJ59 | 411332 | 82 | AR241: 5, AR249: 5, AR310: 5, AR186: 4, AR251: 4, AR052: 4, AR282: 3, AR171: 3, AR055: 3, AR309: 3, AR224: 3, AR176: 3, AR033: 3, AR248: 3, AR184: 3, AR206: 3, |
| | | | | AR247: 3, AR061: 2, AR312: 2, AR180: 2, AR253: 2, AR183: 2, AR204: 2, AR265: 2, AR217: 2, AR295: 2, AR299: 2, AR188: 2, AR264: 2, AR268: 2, AR292: 2, AR198: 2, |
| | | | | AR238: 2, AR233: 1, AR213: 1, AR182: 1, AR235: 1, AR277: 1, AR060: 1, AR291: 1, AR286: 1, AR178: 1, AR053: 1, AR165: 1, AR259: 1, AR226: 1, AR166: 1, AR267: 1, |
| | | | | AR237: 1, AR257: 1, AR089: 1, AR313: 1, AR293: 1, AR294: 1, AR234: 1, AR231: 1, AR266: 1, AR230: 1, AR296: 1, AR163: 1, AR298: 1, AR162: 1, AR283: 1, AR300: 1, |
| | | | | AR269: 1, AR096: 1, AR185: 1, AR161: 1, AR200: 1, AR232: 1, L0748: 9, H0620: 6, L0439: 6, L0766: 5, L0774: 5, H0657: 4, L0758: 4, |
| | | | | S0358: 3, H0617: 3, L0740: 3, L0747: 3, |
| | | | | L0752: 3, S0360: 2, S0278: 2, H0492: 2, H0150: 2, H0102: 2, L0769: 2, L0662: 2, L0806: 2, L0527: 2, H0696: 2, S3014: 2, L0756: 2, L0755: 2, L0731: 2, L0759: 2, L0591: 2, |
| | | | | H0422: 2, H0556: 1, H0295: 1, H0656: 1, H0341: 1, H0661: 1, S0418: 1, S0420: 1, S0356: 1, S0410: 1, L0717: 1, H0575: 1, H0318: 1, |
| | | | | H0421: 1, S0049: 1, H0597: 1, H0545: 1, |
| | | | | H0050: 1, H0012: 1, L0492: 1, H0239: 1, H0594: 1, H0424: 1, H0181: 1, H0165: 1, H0413: 1, H0059: 1, L0370: 1, S0294: 1, |
| | | | | S0422: 1, H0529: 1, L0763: 1, L0770: 1, L0639: 1, |
| | | | | L0771: 1, L0773: 1, L0767: 1, L0768: 1, L0775: 1, L0651: 1, L0376: 1, L0776: 1, L0655: 1, L0657: 1, L0659: 1, L0542: 1, L0526: 1, L0783: 1, L0809: 1, L0529: 1, L0663: 1, |
| | | | | L0665: 1, H0144: 1, S0374: 1, H0693: 1, L0438: 1, S0330: 1, S0380: 1, H0134: 1, L0749: 1, L0750: 1, L0786: 1, L0777: 1, H0543: 1 and S0452: 1. |
| 73 | HHGDW43 | 554613 | 83 | AR161: 7, AR163: 7, AR162: 7, AR176: 7, AR266: 7, AR182: 6, AR165: 6, AR178: 6, AR253: 6, AR055: 6, AR233: 6, AR164: 6, AR166: 6, AR060: 6, AR268: 5, AR181: 5, |
| | | | | AR269: 5, AR267: 5, AR229: 5, AR309: 5, AR177: 5, AR255: 5, AR257: 5, AR228: 5, AR175: 5, AR238: 5, AR289: 5, AR237: 5, AR239: 5, AR183: 4, AR053: 4, AR197: 4, |
| | | | | AR061: 4, AR313: 4, AR272: 4, AR261: 4, AR089: 4, AR174: 4, AR231: 4, AR270: 4, AR230: 4, AR296: 4, AR104: 4, AR271: 4, AR308: 4, AR264: 4, AR285: 4, AR277: 4, |
| | | | | AR201: 4, AR240: 4, AR173: 4, AR179: 4, AR247: 4, AR293: 4, AR262: 4, AR254: 3, AR291: 3, AR300: 3, AR226: 3, AR096: 3, AR252: 3, AR316: 3, AR236: 3, AR193: 3, |
| | | | | AR196: 3, AR213: 3, AR312: 3, AR288: 3, AR200: 3, AR185: 3, AR191: 3, AR246: 3, AR227: 3, AR299: 3, AR282: 3, AR283: 3, AR287: 3, AR189: 3, AR297: 3, AR199: 3, |
| | | | | AR295: 3, AR207: 3, AR290: 3, AR311: 3, AR224: 3, AR286: 3, AR232: 3, AR234: 3, AR250: 2, AR219: 2, AR039: 2, AR171: 2, AR214: 2, AR294: 2, AR203: 2, AR190: 2, |
| | | | | AR274: 2, AR260: 2, AR218: 2, AR168: 2, AR263: 2, AR258: 2, AR217: 2, AR169: 2, AR212: 2, AR033: 2, AR210: 2, AR188: 2, AR243: 2, AR225: 2, AR180: 2, AR275: 1, |
| | | | | AR172: 1, AR216: 1, H0333: 1 |
| 74 | HHPEC09 | 695726 | 84 | AR254: 11, AR309: 9, AR264: 8, AR253: 8, AR176: 8, AR173: 7, AR182: 7, AR169: 7, AR268: 7, AR269: 7, AR162: 7, AR161: 6, AR183: 6, AR163: 6, AR270: 6, AR266: 6, |
| | | | | AR235: 6, AR229: 6, AR221: 6, AR204: 6, AR165: 6, AR228: 6, AR055: 6, AR164: 6, AR267: 5, AR261: 5, AR233: 5, AR181: 5, AR166: 5, AR179: 5, AR175: 5, AR060: 5, |
| | | | | AR255: 5, AR293: 5, AR214: 5, AR174: 5, AR290: 5, AR177: 5, AR300: 5, AR262: 5, AR239: 5, AR180: 4, AR296: 4, AR257: 4, AR178: 4, AR247: 4, AR236: 4, AR061: 4, |
| | | | | AR237: 4, AR313: 4, AR201: 4, AR039: 4, AR189: 4, AR287: 4, AR190: 4, AR291: 4, AR191: 4, AR231: 4, AR089: 4, AR172: 4, AR096: 4, AR238: 4, AR225: 4, AR297: 4, |
| | | | | AR289: 4, AR185: 4, AR217: 4, AR170: 4, AR299: 4, AR104: 4, AR312: 4, AR288: 4, AR230: 4, AR227: 4, AR234: 3, AR226: 3, AR316: 3, AR294: 3, AR295: 3, AR203: 3, |
| | | | | AR285: 3, AR188: 3, AR286: 3, AR308: 3, AR053: 3, AR205: 3, AR192: 3, AR271: 3, AR197: 3, AR171: 3, AR283: 3, AR277: 3, AR282: 3, AR224: 3, AR311: 3, AR033: 3, |
| | | | | AR232: 3, AR272: 3, AR207: 3, AR256: 3, AR213: 3, AR258: 2, AR223: 2, AR193: 2, AR196: 2, AR260: 2, AR240: 2, AR216: 2, AR242: 2, AR222: 2, AR210: 2, AR274: 2, |
| | | | | AR218: 2, AR219: 2, AR200: 2, AR243: 2, AR275: 1, AR211: 1, S0360: 3, L0769: 3, L0747: 3, H0046: 2, H0708: 2, H0087: 2, |
| | | | | L0774: 2, L0378: 2, L0663: 2, L0744: 2, H0713: 1, |
| | | | | H0294: 1, T0049: 1, H0661: 1, S0356: 1, S0442: 1, S0444: 1, S0046: 1, S0476: 1, H0550: 1, S0222: 1, H0333: 1, H0618: 1, S0049: 1, H0086: 1, H0051: 1, H0687: 1, T0023: 1, |
| | | | | L0483: 1, H0124: 1, H0264: 1, S0002: 1, L0763: 1, L0772: 1, L0646: 1, L0794: 1, L0766: 1, L0649: 1, L0803: 1, L0658: 1, L0540: 1, L0793: 1, L0665: 1, S0126: 1, H0670: 1, |
| | | | | H0660: 1, H0672: 1, H0555: 1, L0751: 1, L0749: 1, L0779: 1, L0752: 1, L0731: 1, H0445: 1, S0436: 1, L0592: 1, L0361: 1, H0423: 1 and H0352: 1. |
| 75 | HHPTJ65 | 490904 | 85 | AR104: 5, AR252: 4, AR254: 4, AR235: 3, AR180: 3, AR225: 3, AR055: 2, AR165: 2, AR060: 2, AR166: 2, AR274: 2, AR277: 2, AR204: 2, AR182: 2, AR053: 2, AR282: 2, |
| | | | | AR164: 2, AR257: 2, AR223: 2, AR264: 2, AR240: 2, AR266: 1, AR168: 1, AR294: 1, AR286: 1, AR177: 1, AR275: 1, AR243: 1, AR269: 1, AR039: 1, AR175: 1, AR288: 1, |
| | | | | AR089: 1, AR289: 1, AR229: 1, L0805: 14, L0439: 8, L0770: 5, L0438: 5, L0752: 5, L0776: 3, L0759: 3, S0010: 2, L0769: 2, |
| | | | | L0771: 2, L0745: 2, L0777: 2, L0753: 2, L3111: 1, |
| | | | | S6026: 1, S0300: 1, H0351: 1, H0333: 1, H0563: 1, S6028: 1, S0036: 1, H0413: 1, S0112: 1, S0210: 1, L0640: 1, L4747: 1, L0800: 1, L0774: 1, L0659: 1, L0792: 1, S3014: 1, |
| | | | | L0741: 1, L0750: 1, L0756: 1, L0780: 1, S0194: 1 and S0276: 1. |
| 76 | HJABX32 | 487807 | 86 | AR060: 16, AR055: 15, AR271: 11, AR282: 10, AR104: 10, AR089: 9, AR283: 9, AR299: 8, AR253: 7, AR185: 7, AR039: 6, AR096: 6, AR316: 6, AR300: 6, AR193: 6, |
| | | | | AR176: 6, AR235: 5, AR198: 5, AR213: 5, AR221: 5, AR197: 5, AR243: 5, AR178: 4, AR218: 4, AR269: 4, AR291: 4, AR224: 4, AR196: 4, AR275: 4, AR277: 4, AR245: 4, |
| | | | | AR266: 4, AR172: 4, AR053: 4, AR313: 4, AR309: 4, AR228: 4, AR192: 4, AR225: 4, AR168: 4, AR264: 4, AR270: 4, AR169: 3, AR162: 3, AR165: 3, AR222: 3, AR164: 3, |
| | | | | AR177: 3, AR166: 3, AR250: 3, AR204: 3, AR161: 3, AR240: 3, AR207: 3, AR183: 3, AR246: 3, AR229: 3, AR182: 3, AR033: 3, AR268: 3, AR261: 3, AR267: 3, AR195: 3, |
| | | | | AR201: 3, AR175: 3, AR272: 3, AR254: 3, AR247: 3, AR238: 3, AR289: 3, AR233: 3, AR179: 3, AR242: 3, AR295: 3, AR180: 3, AR163: 2, AR296: 2, AR230: 2, AR288: 2, |
| | | | | AR274: 2, AR226: 2, AR231: 2, AR219: 2, AR294: 2, AR239: 2, AR255: 2, AR297: 2, AR293: 2, AR212: 2, AR236: 2, AR232: 2, AR234: 2, AR237: 2, AR290: 2, AR312: 2, |
| | | | | AR173: 2, AR227: 2, AR287: 2, AR181: 2, AR205: 2, AR191: 2, AR214: 2, AR217: 2, AR061: 2, AR171: 2, AR257: 2, AR200: 2, AR189: 2, AR311: 2, AR216: 2, AR188: 2, |
| | | | | AR256: 1, AR199: 1, AR286: 1, AR190: 1, AR174: 1, AR252: 1, AR170: 1, AR211: 1, AR260: 1, L0157: 3, L0748: 2, L0731: 2, H0656: 1, L0005: 1, S0408: 1, H0729: 1, |
| | | | | S0278: 1, H0261: 1, L3653: 1, H0101: 1, H0052: 1, L0471: 1, H0024: 1, H0424: 1, H0213: 1, T0041: 1, H0647: 1, L0769: 1, L0363: 1, L0774: 1, L0806: 1, L0805: 1, L0776: 1, |
| | | | | L0807: 1, L0657: 1, H0519: 1, S0406: 1, H0627: 1 and L0744: 1. |
| 77 | HJBCU04 | 877643 | 87 | AR313: 6, AR310: 6, AR055: 3, AR168: 3, AR282: 3, AR178: 3, AR171: 3, AR292: 3, AR205: 3, AR272: 2, AR266: 2, AR290: 2, AR052: 2, AR096: 2, AR298: 2, AR248: 2, |
| | | | | AR183: 2, AR172: 2, AR251: 2, AR270: 2, AR180: 2, AR291: 2, AR300: 2, AR293: 2, AR214: 2, AR289: 2, AR295: 2, AR182: 2, AR253: 2, AR294: 2, AR312: 1, AR316: 1, |
| | | | | AR286: 1, AR226: 1, AR089: 1, AR060: 1, AR277: 1, AR225: 1, AR222: 1, AR261: 1, AR216: 1, AR284: 1, AR268: 1, AR267: 1, AR314: 1, AR299: 1, AR246: 1, AR238: 1, |
| | | | | AR217: 1, AR237: 1, AR033: 1, AR061: 1, AR259: 1, AR296: 1, AR262: 1, AR233: 1, AR189: 1, AR199: 1, AR247: 1, AR258: 1, L0770: 7, L0769: 7, L0766: 7, L0748: 7, |
| | | | | H0341: 6, H0318: 6, L0776: 6, H0083: 5, S0422: 5, L0764: 5, S0374: 5, L0750: 5, S0444: 4, H0486: 4, H0581: 4, L0761: 4, L0774: 4, L0655: 4, L0809: 4, L0740: 4, L0754: 4, |
| | | | | L0749: 4, L0596: 4, H0657: 3, H0722: 3, H0494: 3, S0372: 3, L0804: 3, L0628: 3, S0126: 3, H0659: 3, H0648: 3, L0752: 3, H0445: 3, |
| | | | | H0265: 2, H0556: 2, H0656: 2, H0662: 2, |
| | | | | S0358: 2, S0410: 2, H0741: 2, T0039: 2, H0036: 2, H0544: 2, L0471: 2, H0266: 2, S0214: 2, H0039: 2, H0063: 2, H0264: 2, T0042: 2, S0150: 2, S0344: 2, L0762: 2, L0768: 2, |
| | | | | L0387: 2, L0381: 2, L0775: 2, L0806: 2, L0665: 2, L3391: 2, L3819: 2, H0593: 2, H0672: 2, S0380: 2, L0747: 2, L0780: 2, L0759: 2, H0543: 2, H0739: 1, H0686: 1, S0134: 1, |
| | | | | H0650: 1, L0785: 1, S0116: 1, H0483: 1, H0661: 1, H0664: 1, H0638: 1, S0442: 1, S0376: 1, S0360: 1, S0408: 1, H0637: 1, H0742: 1, S0046: 1, H0351: 1, S0278: 1, H0586: 1, |
| | | | | H0632: 1, L0623: 1, L0586: 1, T0109: 1, H0013: 1, T0048: 1, S0182: 1, H0052: 1, H0327: 1, H0546: 1, H0545: 1, H0086: 1, H0123: 1, |
| | | | | H0050: 1, H0373: 1, H0355: 1, H0375: 1, |
| | | | | S0003: 1, H0622: 1, H0553: 1, H0644: 1, H0617: 1, H0674: 1, S0036: 1, H0040: 1, H0087: 1, H0551: 1, S0016: 1, S0382: 1, S0450: 1, L0065: 1, S0438: 1, H0633: 1, S0142: 1, |
| | | | | S0210: 1, L0598: 1, H0529: 1, L0520: 1, L0772: 1, L0646: 1, L0374: 1, L0771: 1, L0648: 1, L0521: 1, L0662: 1, L0767: 1, L5568: 1, L0499: 1, L0650: 1, L0805: 1, L0379: 1, |
| | | | | L0607: 1, L0807: 1, L0657: 1, L0659: 1, L0783: 1, L0384: 1, L5623: 1, L0787: 1, L0789: 1, L0532: 1, L0664: 1, L0709: 1, L2657: 1, L2653: 1, L2264: 1, H0144: 1, H0698: 1, |
| | | | | L3811: 1, H0547: 1, S0122: 1, H0689: 1, H0660: 1, H0666: 1, S0328: 1, S0378: 1, H0709: 1, H0518: 1, S0136: 1, H0521: 1, |
| | | | | H0522: 1, S0406: 1, H0436: 1, H0576: 1, H0727: 1, |
| | | | | S3012: 1, L0756: 1, L0755: 1, L0731: 1, L0757: 1, L0758: 1, S0434: 1, L0480: 1, S0026: 1, H0136: 1, S0196: 1, H0542: 1 and H0422: 1. |
| 78 | HJMBN89 | 565675 | 88 | AR223: 25, AR263: 23, AR235: 22, AR214: 22, AR311: 21, AR224: 21, AR168: 20, AR222: 19, AR196: 17, AR217: 17, AR264: 17, AR215: 17, AR169: 17, AR171: 16, |
| | | | | AR295: 16, AR170: 16, AR221: 15, AR172: 15, AR163: 15, AR261: 15, AR216: 15, AR225: 15, AR309: 14, AR236: 14, AR161: 13, AR162: 13, AR287: 13, AR177: 13, |
| | | | | AR286: 13, AR288: 13, AR240: 12, AR285: 12, AR165: 12, AR297: 12, AR164: 11, AR282: 11, AR166: 10, AR308: 10, AR174: 10, AR199: 10, AR293: 10, AR191: 10, |
| | | | | AR291: 10, AR176: 10, AR188: 10, AR096: 9, AR275: 9, AR211: 9, AR175: 9, AR219: 9, AR247: 9, AR316: 9, AR258: 9, AR181: 9, |
| | | | | AR200: 9, AR190: 9, AR210: 9, AR189: 9, |
| | | | | AR183: 8, AR269: 8, AR289: 8, AR203: 8, AR277: 8, AR312: 8, AR104: 8, AR262: 8, AR270: 8, AR255: 8, AR296: 8, AR234: 8, AR218: 8, AR290: 7, AR260: 7, AR089: 7, |
| | | | | AR231: 7, AR173: 7, AR294: 7, AR226: 7, AR213: 7, AR227: 7, AR268: 7, AR033: 7, AR233: 7, AR257: 7, AR060: 7, AR055: 7, AR300: 7, AR239: 6, AR299: 6, AR313: 6, |
| | | | | AR232: 6, AR230: 6, AR185: 6, AR266: 6, AR053: 6, AR212: 6, AR238: 6, AR180: 6, AR229: 6, AR274: 6, AR178: 6, AR061: 5, AR267: 5, AR182: 5, AR179: 5, AR228: 5, |
| | | | | AR256: 5, AR237: 5, AR272: 4, AR283: 4, AR039: 2, AR207: 2, AR205: 1, AR246: 1, H0458: 1, H0013: 1, H0545: 1, H0413: 1, L0768: 1, L0747: 1, L0777: 1 and H0445: 1. |
| 79 | HJMBW30 | 491209 | 89 | AR245: 16, AR246: 12, AR207: 11, AR291: 11, AR205: 10, AR235: 9, AR197: 9, AR165: 9, AR243: 9, AR212: 9, AR164: 9, AR161: 9, AR201: 8, AR166: 8, AR162: 8, |
| | | | | AR163: 8, AR286: 8, AR195: 8, AR242: 8, AR311: 8, AR261: 8, AR192: 8, AR217: 8, AR275: 8, AR287: 8, AR053: 8, AR224: 8, AR214: 8, AR196: 8, AR198: 7, AR213: 7, |
| | | | | AR168: 7, AR223: 7, AR262: 7, AR172: 7, AR170: 7, AR169: 7, AR297: 7, AR264: 7, AR257: 7, AR289: 7, AR254: 7, AR250: 7, AR288: 7, AR272: 7, AR199: 6, AR215: 6, |
| | | | | AR225: 6, AR180: 6, AR285: 6, AR263: 6, AR253: 6, AR222: 6, AR308: 6, AR236: 6, AR295: 6, AR271: 6, AR266: 6, AR258: 6, AR221: 6, AR216: 6, AR296: 6, AR312: 6, |
| | | | | AR293: 6, AR309: 5, AR274: 5, AR188: 5, AR240: 5, AR185: 5, AR252: 5, AR193: 5, AR204: 5, AR033: 5, AR191: 5, AR176: 5, AR283: 5, AR260: 5, AR189: 5, AR294: 5, |
| | | | | AR177: 5, AR247: 5, AR183: 4, AR255: 4, AR171: 4, AR238: 4, AR256: 4, AR175: 4, AR089: 4, AR039: 4, AR231: 4, AR178: 4, AR210: 4, AR282: 4, AR200: 4, AR211: 4, |
| | | | | AR300: 4, AR269: 4, AR203: 4, AR181: 4, AR174: 4, AR270: 4, AR055: 4, AR190: 4, AR173: 4, AR230: 3, AR061: 3, AR104: 3, AR313: 3, AR234: 3, AR268: 3, AR239: 3, |
| | | | | AR316: 3, AR060: 3, AR229: 3, AR299: 3, AR179: 3, AR232: 3, AR237: 3, AR218: 3, AR182: 3, AR277: 3, AR290: 3, AR219: 3, AR096: 3, AR267: 2, AR227: 2, AR226: 2, |
| | | | | AR228: 2, AR233: 2, L0439: 2, S0358: 1, S0376: 1, H0776: 1, S0474: 1, H0597: 1, H0545: 1, H0081: 1, H0373: 1, H0271: 1, H0494: 1, |
| | | | | S0150: 1, L2654: 1, S0374: 1, H0724: 1, |
| | | | | H0521: 1, H0696: 1, H0478: 1, L0747: 1, L0604: 1 and S0011: 1. |
| 80 | HKAB184 | 565078 | 90 | AR271: 11, AR242: 9, AR216: 8, AR253: 7, AR225: 7, AR214: 7, AR205: 7, AR195: 6, AR165: 6, AR207: 6, AR296: 6, AR164: 6, AR198: 6, AR089: 6, AR254: 6, AR224: 6, |
| | | | | AR250: 6, AR166: 6, AR217: 6, AR309: 6, AR212: 6, AR245: 6, AR192: 6, AR263: 6, AR215: 6, AR221: 6, AR312: 5, AR162: 5, AR196: 5, AR308: 5, AR161: 5, AR096: 5, |
| | | | | AR299: 5, AR163: 5, AR246: 5, AR213: 5, AR313: 5, AR243: 5, AR053: 5, AR193: 5, AR222: 5, AR264: 5, AR223: 5, AR311: 5, AR060: 5, AR204: 4, AR197: 4, AR188: 4, |
| | | | | AR274: 4, AR261: 4, AR175: 4, AR201: 4, AR172: 4, AR285: 4, AR189: 4, AR316: 4, AR039: 4, AR169: 4, AR171: 4, AR173: 4, AR300: 4, AR268: 4, AR282: 4, AR176: 4, |
| | | | | AR199: 4, AR104: 4, AR033: 4, AR168: 4, AR235: 4, AR190: 4, AR200: 4, AR240: 4, AR295: 3, AR288: 3, AR257: 3, AR277: 3, AR252: 3, AR291: 3, AR297: 3, AR203: 3, |
| | | | | AR238: 3, AR286: 3, AR177: 3, AR294: 3, AR174: 3, AR289: 3, AR191: 3, AR183: 3, AR210: 3, AR283: 3, AR185: 3, AR180: 3, AR255: 3, AR178: 3, AR247: 3, AR290: 3, |
| | | | | AR262: 3, AR269: 3, AR230: 3, AR293: 3, AR270: 3, AR287: 2, AR226: 2, AR181: 2, AR258: 2, AR275: 2, AR219: 2, AR267: 2, AR218: 2, AR239: 2, AR179: 2, AR232: 2, |
| | | | | AR234: 2, AR272: 2, AR237: 2, AR229: 2, AR231: 2, AR061: 2, AR233: 2, AR236: 2, AR228: 2, AR182: 2, AR227: 1, AR256: 1, AR266: 1, AR260: 1, AR170: 1, L0794: 9, |
| | | | | L0777: 6, L0809: 4, L0779: 4, L0731: 4, L0766: 3, L0666: 3, L0663: 3, L3825: 3, H0547: 3, S0444: 2, L3459: 2, L3480: 2, L3817: 2, L0483: 2, L0770: 2, L0521: 2, L0768: 2, |
| | | | | L0803: 2, L0775: 2, L0805: 2, L0661: 2, L0665: 2, H0144: 2, L3827: 2, L3828: 2, H0658: 2, H0670: 2, S0406: 2, L0439: 2, L0754: 2, L0749: 2, L0756: 2, H0543: 2, H0556: 1, |
| | | | | H0657: 1, H0662: 1, S0360: 1, L3262: 1, L2799: 1, H0411: 1, S0278: 1, H0443: 1, H0550: 1, L3816: 1, T0039: 1, L3499: 1, L2647: 1, H0013: 1, H0427: 1, H0575: 1, S0474: 1, |
| | | | | H0052: 1, H0591: 1, H0038: 1, H0040: 1, H0616: 1, H0264: 1, H0494: 1, S0440: 1, H0649: 1, L0598: 1, H0529: 1, L0369: 1, L0640: 1, |
| | | | | L3904: 1, L0662: 1, L0804: 1, L0375: 1, |
| | | | | L0378: 1, L0806: 1, L0653: 1, L0776: 1, L0807: 1, L0788: 1, L0664: 1, L2259: 1, L2654: 1, L3812: 1, S0126: 1, H0689: 1, H0435: 1, H0539: 1, H0696: 1, S0176: 1, H0555: 1, |
| | | | | H0785: 1, L0747: 1, L0755: 1, L0757: 1, L0758: 1, L0608: 1, L0362: 1, S0026: 1, S0424: 1 and L3808: 1. |
| 81 | HKACB56 | 554616 | 91 | AR223: 8, AR235: 8, AR263: 7, AR222: 7, AR170: 7, AR221: 7, AR207: 7, AR216: 7, AR169: 7, AR224: 7, AR168: 7, AR171: 7, AR311: 7, AR198: 7, AR309: 7, AR214: 6, |
| | | | | AR225: 6, AR053: 6, AR197: 6, AR212: 6, AR215: 6, AR089: 6, AR264: 6, AR245: 6, AR205: 5, AR217: 5, AR165: 5, AR163: 5, AR161: 5, AR162: 5, AR164: 5, AR166: 5, |
| | | | | AR275: 5, AR308: 5, AR213: 5, AR172: 5, AR312: 4, AR277: 4, AR274: 4, AR246: 4, AR196: 4, AR060: 4, AR271: 4, AR282: 4, AR195: 4, AR295: 4, AR261: 4, AR269: 4, |
| | | | | AR230: 4, AR316: 4, AR181: 4, AR288: 4, AR176: 4, AR055: 3, AR240: 3, AR204: 3, AR297: 3, AR283: 3, AR313: 3, AR177: 3, AR210: 3, AR285: 3, AR242: 3, AR296: 3, |
| | | | | AR039: 3, AR199: 3, AR096: 3, AR173: 3, AR272: 3, AR236: 3, AR200: 3, AR252: 3, AR254: 3, AR238: 3, AR175: 3, AR291: 3, AR193: 3, AR299: 3, AR247: 3, AR191: 3, |
| | | | | AR033: 3, AR188: 3, AR286: 3, AR289: 3, AR300: 3, AR185: 3, AR201: 3, AR174: 3, AR270: 3, AR262: 3, AR237: 2, AR293: 2, AR104: 2, AR232: 2, AR287: 2, AR294: 2, |
| | | | | AR178: 2, AR189: 2, AR229: 2, AR234: 2, AR226: 2, AR239: 2, AR061: 2, AR182: 2, AR290: 2, AR203: 2, AR227: 2, AR255: 2, AR183: 2, AR190: 2, AR233: 2, AR211: 2, |
| | | | | AR231: 2, AR257: 2, AR267: 2, AR228: 2, AR243: 2, AR258: 2, AR256: 2, AR179: 1, AR215: 1, AR268: 1, AR219: 1, AR192: 1, AR180: 1, |
| | | | | AR253: 1, H0494: 4, L0045: 1 and L0806: 1. |
| 82 | HKACM93 | 1352383 | 92 | AR194: 22, AR206: 21, AR202: 20, AR244: 20, AR284: 18, AR205: 17, AR241: 14, AR281: 13, AR315: 13, AR243: 12, AR266: 12, AR246: 11, AR265: 11, AR271: 10, |
| | | | | AR289: 10, AR273: 10, AR280: 10, AR184: 10, AR198: 9, AR314: 9, AR298: 9, AR310: 9, AR192: 9, AR292: 9, AR274: 8, AR263: 8, |
| | | | | AR282: 8, AR291: 8, AR296: 8, AR270: 8, |
| | | | | AR269: 7, AR183: 7, AR285: 7, AR232: 7, AR268: 7, AR227: 7, AR286: 7, AR231: 7, AR204: 7, AR238: 6, AR033: 6, AR295: 6, AR186: 6, AR251: 6, AR247: 6, AR240: 6, |
| | | | | AR221: 6, AR275: 5, AR290: 5, AR277: 5, AR312: 5, AR248: 5, AR182: 5, AR283: 5, AR299: 5, AR267: 5, AR234: 5, AR300: 4, AR039: 4, AR055: 4, AR249: 4, AR294: 4, |
| | | | | AR313: 4, AR061: 4, AR177: 4, AR229: 4, AR096: 4, AR175: 4, AR226: 4, AR233: 4, AR213: 4, AR293: 3, AR237: 3, AR309: 3, AR052: 3, AR219: 3, AR316: 3, AR253: 3, |
| | | | | AR089: 3, AR217: 3, AR215: 3, AR252: 3, AR053: 3, AR172: 3, AR163: 3, AR185: 2, AR104: 2, AR235: 2, AR259: 2, AR264: 2, AR250: 2, AR060: 2, AR196: 2, AR162: 2, |
| | | | | AR256: 2, AR181: 2, AR161: 2, AR258: 2, AR257: 2, AR171: 1, AR224: 1, AR169: 1, AR179: 1, AR245: 1, AR210: 1, AR211: 1, AR272: 1, AR218: 1, AR176: 1, AR193: 1, |
| | | | | H0494: 4, L0761: 2, L0656: 2, L0744: 2, L0749: 2, L0777: 2, S0376: 1, H0544: 1, H0355: 1, H0594: 1, H0647: 1, L0374: 1, L0764: 1, L0773: 1, L0787: 1, L0666: 1, H0520: 1, |
| | | | | H0547: 1, S0380: 1, L0748: 1 and L0595: 1. |
| | HKACM93 | 907084 | 229 | |
| | HKACM93 | 907085 | 230 | |
| | HKACM93 | 906154 | 231 | |
| | HKACM93 | 906150 | 232 | |
| 83 | HKADQ91 | 604123 | 93 | AR211: 37, AR199: 28, AR275: 8, AR215: 8, AR210: 7, AR245: 7, AR234: 6, AR238: 6, AR239: 5, AR224: 5, AR178: 5, AR195: 5, |
| | | | | AR272: 5, AR180: 4, AR181: 4, AR173: 4, |
| | | | | AR229: 4, AR197: 4, AR191: 4, AR188: 4, AR161: 4, AR162: 4, AR163: 4, AR237: 4, AR164: 3, AR288: 3, AR165: 3, AR169: 3, AR252: 3, AR270: 3, AR189: 3, AR311: 3, |
| | | | | AR176: 3, AR268: 3, AR207: 3, AR174: 3, AR244: 3, AR200: 3, AR255: 3, AR190: 3, AR282: 3, AR269: 3, AR203: 3, AR196: 3, AR216: 3, AR297: 3, AR246: 3, AR183: 3, |
| | | | | AR223: 3, AR052: 3, AR310: 2, AR166: 2, AR201: 2, AR290: 2, AR230: 2, AR232: 2, AR277: 2, AR247: 2, AR175: 2, AR179: 2, AR308: 2, AR226: 2, AR287: 2, AR295: 2, |
| | | | | AR267: 2, AR243: 2, AR172: 2, AR192: 2, AR271: 2, AR240: 2, AR182: 2, AR205: 2, AR198: 2, AR291: 2, AR264: 1, AR212: 1, AR231: 1, AR233: 1, AR257: 1, AR263: 1, |
| | | | | AR309: 1, AR316: 1, AR089: 1, AR299: 1, AR262: 1, AR228: 1, AR185: 1, AR217: 1, AR296: 1, AR033: 1, AR286: 1, AR284: 1, AR177: 1, AR227: 1, AR285: 1, AR274: 1, |
| | | | | AR266: 1, AR294: 1, AR289: 1, AR061: 1, AR300: 1, L5622: 9, L0777: 6, H0586: 5, H0661: 3, S0476: 2, H0592: 2, H0587: 2, H0013: 2, |
| | | | | H0494: 2, H0519: 2, H0171: 1, S0001: 1, |
| | | | | L3816: 1, H0486: 1, H0575: 1, H0251: 1, L0738: 1, S0214: 1, H0644: 1, H0488: 1, S0438: 1, H0647: 1, L0369: 1, L0770: 1, L0637: 1, L0772: 1, L0659: 1, L0647: 1, L0666: 1, |
| | | | | H0682: 1, H0753: 1, S3014: 1, S0027: 1, S0028: 1, S0032: 1, L0747: 1, L0755: 1, H0595: 1 and H0667: 1. |
| 84 | HKAEG43 | 889521 | 94 | AR214: 32, AR223: 28, AR263: 27, AR224: 26, AR222: 25, AR169: 25, AR207: 24, AR216: 24, AR168: 23, AR170: 21, AR309: 21, AR172: 21, AR225: 20, AR215: 20, |
| | | | | AR221: 19, AR235: 19, AR171: 19, AR311: 18, AR212: 18, AR192: 18, AR217: 18, AR264: 16, AR161: 16, AR162: 16, AR308: 16, AR163: 15, AR240: 15, AR195: 15, |
| | | | | AR089: 14, AR165: 14, AR242: 14, AR213: 14, AR164: 13, AR053: 13, AR166: 13, AR277: 13, AR253: 13, AR245: 13, AR261: 13, AR196: 13, AR283: 12, AR282: 12, |
| | | | | AR288: 12, AR197: 11, AR312: 11, AR316: 11, AR205: 11, AR198: 11, AR236: 11, AR295: 11, AR285: 10, AR289: 10, AR271: 10, AR291: 10, AR039: 10, AR299: 10, |
| | | | | AR033: 10, AR177: 10, AR096: 10, AR060: 10, AR180: 10, AR275: 10, AR297: 9, AR193: 9, AR252: 9, AR286: 9, AR201: 9, AR211: 9, AR254: 9, AR246: 9, AR296: 9, |
| | | | | AR199: 9, AR272: 9, AR287: 9, AR247: 8, AR313: 8, AR181: 8, AR210: 8, AR176: 8, AR300: 8, AR175: 8, AR055: 8, AR266: 8, AR174: 8, AR274: 8, AR293: 8, AR104: 8, |
| | | | | AR229: 8, AR218: 8, AR185: 8, AR256: 8, AR239: 8, AR232: 8, AR243: 8, AR262: 7, AR183: 7, AR178: 7, AR188: 7, AR204: 7, AR231: 7, AR200: 7, AR258: 7, AR269: 7, |
| | | | | AR257: 7, AR189: 7, AR219: 7, AR230: 6, AR173: 6, AR238: 6, AR234: 6, AR270: 6, AR191: 6, AR268: 6, AR255: 6, AR290: 6, AR226: 6, AR190: 6, AR260: 6, AR227: 5, |
| | | | | AR061: 5, AR237: 5, AR294: 5, AR203: 5, AR267: 5, AR250: 5, AR179: 5, AR233: 4, AR228: 4, AR182: 4, H0521: 6, H0556: 4, L0757: 3, H0494: 2, S0126: 2, L0743: 2, |
| | | | | L0592: 2, H0265: 1, H0550: 1, S0222: 1, H0635: 1, H0544: 1, H0123: 1, H0012: 1, H0375: 1, H0674: 1, H0412: 1, L0640: 1, S0330: 1, |
| | | | | H0555: 1, L0756: 1, L0753: 1, L0758: 1, |
| | | | | L0759: 1, L0485: 1, H0542: 1 and H0543: 1. |
| | HKAEG43 | 753273 | 233 | |
| 85 | HKDBF34 | 833065 | 95 | AR060: 22, AR244: 10, AR194: 8, AR241: 8, AR238: 6, AR281: 6, AR192: 6, AR206: 6, AR205: 6, AR246: 6, AR202: 5, AR282: 5, AR182: 5, |
| | | | | AR271: 5, AR243: 5, AR277: 4, |
| | | | | AR232: 4, AR283: 4, AR226: 4, AR266: 4, AR316: 3, AR251: 3, AR186: 3, AR234: 3, AR053: 3, AR227: 3, AR237: 3, AR284: 3, AR310: 3, AR269: 3, AR204: 3, AR247: 3, |
| | | | | AR231: 3, AR184: 3, AR052: 3, AR198: 3, AR183: 3, AR229: 3, AR313: 3, AR275: 3, AR061: 3, AR312: 2, AR273: 2, AR286: 2, AR295: 2, AR240: 2, AR298: 2, AR039: 2, |
| | | | | AR104: 2, AR299: 2, AR055: 2, AR267: 2, AR289: 2, AR285: 2, AR270: 2, AR268: 2, AR096: 2, AR089: 2, AR213: 2, AR290: 2, AR291: 2, AR185: 2, AR218: 2, AR315: 2, |
| | | | | AR033: 2, AR233: 2, AR253: 2, AR294: 2, AR300: 2, AR265: 2, AR309: 1, AR293: 1, AR219: 1, AR296: 1, AR292: 1, AR280: 1, AR258: 1, AR314: 1, L0803: 25, S0438: 2, |
| | | | | L0774: 2, H0170: 1, H0015: 1, H0356: 1, H0622: 1, H0038: 1, S0015: 1 and H0547: 1. |
| | HKDBF34 | 587268 | 234 | |
| 86 | HKISB57 | 625956 | 96 | AR161: 12, AR162: 12, AR163: 12, AR165: 12, AR164: 11, AR166: 11, AR089: 8, AR225: 7, AR178: 6, AR183: 6, AR172: 6, AR300: 5, AR224: 5, AR181: 5, AR221: 5, |
| | | | | AR223: 5, AR170: 5, AR299: 5, AR039: 4, AR291: 4, AR096: 4, AR268: 4, AR275: 4, AR286: 4, AR274: 4, AR055: 4, AR247: 4, AR222: 4, AR269: 4, AR258: 4, AR257: 4, |
| | | | | AR179: 3, AR240: 3, AR242: 3, AR173: 3, AR182: 3, AR262: 3, AR270: 3, AR272: 3, AR189: 3, AR316: 3, AR267: 3, AR175: 3, AR245: 3, AR313: 3, AR287: 3, AR296: 3, |
| | | | | AR231: 2, AR210: 2, AR171: 2, AR190: 2, AR217: 2, AR205: 2, AR277: 2, AR230: 2, AR295: 2, AR290: 2, AR263: 2, AR060: 2, AR309: 2, AR191: 2, AR228: 2, AR229: 2, |
| | | | | AR104: 2, AR261: 2, AR288: 2, AR174: 2, AR282: 2, AR246: 2, AR255: 2, AR312: 2, AR237: 2, AR169: 2, AR193: 2, AR271: 2, AR201: 2, AR233: 2, AR239: 2, AR197: 1, |
| | | | | AR061: 1, AR226: 1, AR177: 1, AR213: 1, AR195: 1, AR033: 1, AR188: 1, AR238: 1, AR196: 1, AR185: 1, AR293: 1, AR176: 1, AR234: 1, AR227: 1, L0747: 5, L0731: 5, |
| | | | | H0031: 4, L0599: 4, S0045: 3, H0411: 3, H0494: 3, L0783: 3, L0743: 3, L0758: 3, L0759: 3, L0604: 3, H0295: 2, S0356: 2, S0360: 2, S0046: 2, H0413: 2, L0774: 2, H0651: 2, |
| | | | | S0027: 2, L0748: 2, L0439: 2, L0752: 2, L0601: 2, H0484: 1, S0132: 1, H0586: 1, H0333: 1, H0486: 1, H0042: 1, H0122: 1, H0546: 1, |
| | | | | H0041: 1, H0050: 1, H0408: 1, H0288: 1, |
| | | | | H0688: 1, H0424: 1, H0644: 1, H0383: 1, L0772: 1, L0764: 1, L0662: 1, L0364: 1, L0653: 1, L0782: 1, L0789: 1, L0666: 1, L0663: 1, L0664: 1, H0144: 1, S0148: 1, H0593: 1, |
| | | | | H0666: 1, S0330: 1, S0044: 1, S0037: 1, S3014: 1, L0757: 1, S0031: 1, H0667: 1 and H0506: 1. |
| 87 | HKIYP40 | 580845 | 97 | AR173: 7, AR162: 7, AR161: 7, AR163: 7, AR165: 6, AR164: 6, AR166: 6, AR235: 6, AR175: 5, AR274: 5, AR313: 5, AR257: 5, AR191: 5, AR196: 4, AR270: 4, AR285: 4, |
| | | | | AR269: 4, AR252: 4, AR258: 4, AR247: 4, AR200: 4, AR183: 4, AR245: 4, AR262: 4, AR199: 4, AR275: 4, AR179: 4, AR217: 4, AR178: 4, AR312: 4, AR293: 4, AR174: 4, |
| | | | | AR182: 3, AR180: 3, AR219: 3, AR264: 3, AR229: 3, AR297: 3, AR233: 3, AR177: 3, AR272: 3, AR189: 3, AR309: 3, AR240: 3, AR296: 3, AR268: 3, AR255: 3, AR261: 3, |
| | | | | AR287: 3, AR238: 3, AR188: 3, AR260: 3, AR236: 3, AR234: 3, AR288: 3, AR181: 3, AR291: 3, AR231: 3, AR286: 3, AR294: 3, AR226: 3, AR170: 3, AR290: 2, AR190: 2, |
| | | | | AR218: 2, AR295: 2, AR203: 2, AR299: 2, AR300: 2, AR205: 2, AR221: 2, AR176: 2, AR168: 2, AR239: 2, AR237: 2, AR308: 2, AR185: 2, AR277: 2, AR089: 2, AR316: 2, |
| | | | | AR033: 2, AR267: 2, AR282: 2, AR222: 2, AR210: 2, AR263: 2, AR289: 2, AR228: 2, AR096: 2, AR227: 2, AR197: 2, AR266: 2, AR224: 2, AR204: 2, AR271: 2, AR225: 2, |
| | | | | AR211: 1, AR311: 1, AR193: 1, AR171: 1, AR039: 1, AR216: 1, AR060: 1, AR232: 1, AR061: 1, AR256: 1, AR201: 1, L0511: 18, L0776: 3, L0493: 3, H0659: 3, L0779: 3, |
| | | | | H0637: 2, L0500: 2, L0794: 2, L0809: 2, L0748: 2, L0756: 2, L0599: 2, H0686: 1, H0657: 1, H0645: 1, H0441: 1, L0021: 1, H0545: 1, |
| | | | | H0569: 1, H0050: 1, L0483: 1, H0674: 1, |
| | | | | L0455: 1, H0551: 1, L0805: 1, L0509: 1, L0657: 1, H0435: 1, L0777: 1 and L0362: 1. |
| 88 | HKMLK53 | 587269 | 98 | AR221: 7, AR309: 5, AR312: 5, AR053: 5, AR263: 5, AR291: 4, AR308: 4, AR212: 4, AR252: 4, AR205: 4, AR264: 4, AR275: 4, AR253: 4, AR272: 4, AR246: 4, AR311: 3, |
| | | | | AR223: 3, AR261: 3, AR172: 3, AR296: 3, AR285: 3, AR183: 3, AR313: 3, AR245: 3, AR201: 3, AR178: 2, AR297: 2, AR165: 2, AR162: 2, AR271: 2, AR295: 2, AR161: 2, |
| | | | | AR242: 2, AR164: 2, AR166: 2, AR243: 2, AR169: 2, AR282: 2, AR293: 2, AR283: 2, AR060: 2, AR287: 2, AR286: 2, AR163: 2, AR288: 2, AR266: 2, AR089: 2, AR262: 2, |
| | | | | AR096: 2, AR258: 2, AR255: 2, AR196: 2, AR213: 2, AR257: 2, AR316: 2, AR189: 2, AR193: 2, AR191: 2, AR175: 2, AR174: 2, AR190: 2, AR294: 2, AR039: 2, AR218: 2, |
| | | | | AR200: 2, AR177: 1, AR195: 1, AR210: 1, AR299: 1, AR230: 1, AR219: 1, AR300: 1, AR188: 1, AR185: 1, AR247: 1, AR217: 1, AR270: 1, AR290: 1, AR289: 1, AR226: 1, |
| | | | | AR173: 1, AR268: 1, AR250: 1, L0749: 4, H0144: 2, H0411: 1 and H0431: 1. |
| 89 | HLDON23 | 636083 | 99 | AR235: 6, AR196: 5, AR161: 5, AR162: 5, AR163: 4, AR264: 4, AR176: 4, AR165: 4, AR164: 4, AR238: 4, AR214: 4, AR181: 4, AR166: 4, AR236: 4, AR191: 4, AR253: 4, |
| | | | | AR188: 4, AR177: 3, AR261: 3, AR199: 3, AR252: 3, AR178: 3, AR288: 3, AR247: 3, AR033: 3, AR182: 3, AR286: 3, AR190: 3, AR296: 3, AR170: 3, AR269: 3, AR262: 3, |
| | | | | AR200: 3, AR242: 3, AR255: 3, AR183: 3, AR295: 3, AR205: 3, AR297: 3, AR224: 3, AR285: 3, AR312: 3, AR287: 3, AR268: 3, AR189: 3, AR257: 3, AR282: 3, AR291: 3, |
| | | | | AR175: 3, AR309: 3, AR270: 3, AR171: 3, AR180: 3, AR299: 3, AR293: 2, AR217: 2, AR222: 2, AR179: 2, AR277: 2, AR271: 2, AR229: 2, AR272: 2, AR174: 2, AR240: 2, |
| | | | | AR225: 2, AR243: 2, AR173: 2, AR308: 2, AR228: 2, AR289: 2, AR203: 2, AR239: 2, AR254: 2, AR226: 2, AR233: 2, AR213: 2, AR104: 2, AR258: 2, AR290: 2, AR227: 2, |
| | | | | AR294: 2, AR267: 2, AR234: 2, AR096: 2, AR169: 2, AR237: 2, AR210: 2, AR231: 2, AR313: 2, AR311: 2, AR218: 2, AR219: 2, AR172: 2, AR275: 2, AR039: 2, AR060: 2, |
| | | | | AR316: 2, AR211: 2, AR300: 2, AR230: 2, AR185: 2, AR061: 1, AR089: 1, AR216: 1, AR212: 1, AR193: 1, AR260: 1, AR201: 1, AR232: 1, AR055: 1, L0805: 8, L0809: 6, |
| | | | | L0439: 5, L0777: 5, L0748: 4, L0800: 3, L0662: 3, L0659: 3, L0750: 3, L0758: 3, H0208: 2, H0123: 2, H0617: 2, L0769: 2, L0803: 2, L0776: 2, L0666: 2, L0438: 2, L0780: 2, |
| | | | | L0731: 2, L3643: 1, H0741: 1, H0497: 1, L0622: 1, T0109: 1, H0581: 1, L0738: 1, H0546: 1, H0024: 1, T0010: 1, H0510: 1, H0428: 1, |
| | | | | H0622: 1, H0673: 1, H0598: 1, S0036: 1, |
| | | | | H0163: 1, H0413: 1, L0370: 1, T0041: 1, L0637: 1, L5566: 1, L0667: 1, L0772: 1, L0646: 1, L0764: 1, L0794: 1, L0766: 1, L0649: 1, L0657: 1, L0788: 1, L0663: 1, S0374: 1, |
| | | | | H0666: 1, S0330: 1, H0539: 1, H0521: 1, H0696: 1, H0478: 1, L0741: 1, L0751: 1, L0745: 1, L0747: 1, L0749: 1 and L0752: 1. |
| 90 | HLDOW79 | 847396 | 100 | AR252: 214, AR264: 119, AR250: 104, AR254: 94, AR311: 91, AR194: 85, AR308: 83, AR202: 81, AR195: 78, AR263: 76, AR212: 76, AR281: 73, AR272: 72, AR246: 59, |
| | | | | AR309: 54, AR053: 51, AR206: 51, AR245: 50, AR315: 50, AR253: 49, AR197: 48, AR213: 46, AR244: 45, AR193: 45, AR222: 45, AR241: 44, AR243: 43, AR312: 40, |
| | | | | AR223: 40, AR314: 40, AR280: 40, AR265: 39, AR201: 39, AR224: 38, AR271: 37, AR198: 37, AR205: 35, AR273: 35, AR221: 34, AR214: 34, AR207: 34, AR192: 34, |
| | | | | AR200: 31, AR210: 31, AR096: 31, AR310: 30, AR033: 30, AR169: 29, AR174: 29, AR274: 29, AR219: 28, AR240: 28, AR251: 28, AR164: 27, AR218: 26, AR299: 26, |
| | | | | AR242: 26, AR204: 26, AR165: 25, AR189: 25, AR247: 24, AR172: 24, AR225: 24, AR211: 24, AR166: 24, AR232: 24, AR235: 24, AR313: 23, AR188: 23, AR283: 23, |
| | | | | AR177: 23, AR191: 23, AR171: 23, AR161: 23, AR199: 22, AR168: 22, AR173: 22, AR300: 22, AR052: 22, AR295: 22, AR275: 22, AR282: 21, AR039: 21, AR217: 21, |
| | | | | AR162: 21, AR163: 21, AR196: 21, AR288: 20, AR216: 20, AR178: 20, AR261: 20, AR181: 19, AR316: 19, AR190: 18, AR234: 18, AR215: 18, AR089: 18, AR277: 18, |
| | | | | AR185: 18, AR175: 18, AR183: 18, AR180: 18, AR229: 17, AR231: 17, AR203: 17, AR170: 17, AR292: 17, AR268: 17, AR237: 16, AR238: 16, AR297: 16, AR269: 15, |
| | | | | AR226: 15, AR236: 15, AR266: 15, AR104: 15, AR176: 15, AR290: 14, AR055: 14, AR267: 14, AR270: 14, AR256: 14, AR227: 14, AR285: 14, AR257: 13, AR258: 13, |
| | | | | AR186: 13, AR287: 13, AR239: 13, AR061: 13, AR255: 13, AR296: 13, AR293: 13, AR179: 12, AR286: 12, AR291: 12, AR262: 11, AR230: 11, AR260: 11, AR060: 11, |
| | | | | AR294: 11, AR289: 11, AR182: 10, AR248: 10, AR284: 9, AR233: 9, AR259: 9, AR249: 8, AR228: 6, AR298: 5, AR184: 4, L0758: 6, |
| | | | | L0803: 3, L0748: 3, L0749: 2, H0722: 1, |
| | | | | H0632: 1, H0042: 1, H0510: 1, S0438: 1, L0646: 1, L0806: 1, L0776: 1, L0787: 1 and L0777: 1. |
| 91 | HLJBJ61 | 1019012 | 101 | AR196: 17, AR291: 14, AR235: 14, AR261: 14, AR285: 13, AR272: 11, AR289: 10, AR295: 10, AR033: 10, AR313: 10, AR258: 9, AR256: 9, AR297: 9, AR242: 9, AR165: 9, |
| | | | | AR215: 9, AR287: 9, AR164: 9, AR288: 9, AR312: 9, AR309: 9, AR166: 8, AR224: 8, AR191: 8, AR053: 8, AR308: 8, AR250: 8, AR198: 8, AR266: 8, AR216: 8, AR311: 8, |
| | | | | AR283: 8, AR200: 7, AR180: 7, AR247: 7, AR188: 7, AR255: 7, AR089: 7, AR197: 7, AR212: 7, AR181: 7, AR236: 7, AR262: 7, AR240: 7, AR205: 7, AR217: 7, AR225: 7, |
| | | | | AR294: 6, AR296: 6, AR213: 6, AR271: 6, AR223: 6, AR269: 6, AR263: 6, AR274: 6, AR316: 6, AR195: 6, AR257: 6, AR246: 6, AR178: 6, AR286: 6, AR238: 6, AR210: 6, |
| | | | | AR207: 6, AR185: 6, AR183: 6, AR282: 6, AR245: 6, AR190: 5, AR211: 5, AR264: 5, AR177: 5, AR199: 5, AR293: 5, AR039: 5, AR243: 5, AR290: 5, AR270: 5, AR174: 5, |
| | | | | AR096: 5, AR161: 5, AR162: 5, AR221: 5, AR203: 5, AR189: 5, AR163: 5, AR299: 5, AR060: 5, AR201: 5, AR175: 5, AR193: 4, AR268: 4, AR229: 4, AR214: 4, AR254: 4, |
| | | | | AR176: 4, AR170: 4, AR275: 4, AR173: 4, AR104: 4, AR260: 4, AR204: 4, AR300: 4, AR179: 4, AR192: 4, AR230: 4, AR277: 4, AR219: 4, AR055: 3, AR231: 3, AR234: 3, |
| | | | | AR239: 3, AR226: 3, AR218: 3, AR237: 3, AR061: 3, AR182: 3, AR228: 3, AR222: 3, AR233: 3, AR232: 3, AR267: 2, AR172: 2, AR227: 2, AR169: 1, L0438: 3, L0666: 2, |
| | | | | H0670: 2, L0439: 2, L0745: 2, H0638: 1, S0418: 1, H0486: 1, H0052: 1, H0375: 1, H0188: 1, H0622: 1, H0617: 1, L0055: 1, H0063: 1, |
| | | | | T0067: 1, H0529: 1, L0803: 1, L0659: 1, |
| | | | | L0789: 1, L0663: 1, L0750: 1, H0423: 1 and H0422: 1. |
| | HLJBJ61 | 833665 | 235 | |
| 92 | HLQDH79 | 588446 | 102 | AR235: 19, AR296: 17, AR288: 16, AR287: 15, AR295: 15, AR255: 15, AR261: 14, AR285: 14, AR256: 14, AR291: 14, AR297: 13, AR286: 13, AR236: 12, AR289: 12, |
| | | | | AR258: 12, AR262: 11, AR193: 11, AR293: 11, AR162: 10, AR161: 10, AR266: 10, AR163: 10, AR294: 10, AR169: 10, AR171: 10, |
| | | | | AR257: 9, AR260: 9, AR313: 9, AR283: 9, |
| | | | | AR189: 9, AR089: 9, AR170: 9, AR196: 9, AR178: 9, AR269: 9, AR182: 9, AR168: 8, AR247: 8, AR268: 8, AR191: 8, AR225: 8, AR190: 8, AR165: 8, AR223: 8, AR218: 8, |
| | | | | AR309: 8, AR240: 7, AR164: 7, AR176: 7, AR188: 7, AR183: 7, AR270: 7, AR316: 7, AR166: 7, AR215: 7, AR254: 7, AR217: 7, AR173: 7, AR312: 7, AR175: 7, AR229: 7, |
| | | | | AR250: 7, AR245: 7, AR096: 7, AR300: 7, AR199: 6, AR214: 6, AR201: 6, AR177: 6, AR267: 6, AR174: 6, AR231: 6, AR180: 6, AR246: 6, AR238: 6, AR282: 6, AR207: 6, |
| | | | | AR198: 6, AR233: 6, AR197: 6, AR290: 6, AR181: 6, AR203: 6, AR104: 6, AR053: 6, AR179: 6, AR311: 6, AR204: 6, AR210: 6, AR172: 5, AR299: 5, AR224: 5, AR271: 5, |
| | | | | AR308: 5, AR226: 5, AR221: 5, AR228: 5, AR222: 5, AR275: 5, AR212: 5, AR274: 5, AR205: 5, AR237: 5, AR216: 5, AR239: 5, AR200: 5, AR219: 5, AR243: 5, AR185: 5, |
| | | | | AR264: 4, AR253: 4, AR195: 4, AR033: 4, AR252: 4, AR060: 4, AR232: 4, AR242: 4, AR272: 4, AR055: 4, AR213: 4, AR230: 4, AR234: 4, AR061: 4, AR211: 4, AR192: 3, |
| | | | | AR039: 3, AR263: 3, AR277: 3, AR227: 3, L0439: 9, L3388: 6, L0747: 6, L0769: 5, L0794: 5, L0766: 5, L0748: 5, L0758: 5, |
| | | | | H0556: 4, L0483: 4, L0657: 4, L0596: 4, L0591: 4, |
| | | | | L0604: 4, H0039: 3, H0135: 3, L0438: 3, L0756: 3, L0731: 3, H0265: 2, H0402: 2, S0300: 2, S0222: 2, L0623: 2, H0013: 2, H0052: 2, H0622: 2, H0644: 2, H0551: 2, S0440: 2, |
| | | | | L0764: 2, L0773: 2, L0662: 2, L0768: 2, L0803: 2, L0805: 2, L0653: 2, L5622: 2, L0789: 2, L0666: 2, H0521: 2, L0749: 2, L0779: 2, L0752: 2, L0757: 2, L0605: 2, L0599: 2, |
| | | | | H0665: 2, H0542: 2, H0624: 1, H0222: 1, H0159: 1, L3643: 1, H0713: 1, S6024: 1, S0134: 1, S0430: 1, H0657: 1, S0116: 1, S0282: 1, S0420: 1, S0356: 1, H0728: 1, H0735: 1, |
| | | | | H0733: 1, S0476: 1, H0351: 1, H0549: 1, H0392: 1, H0592: 1, H0574: 1, H0486: 1, L3653: 1, T0114: 1, H0156: 1, H0036: 1, H0120: 1, |
| | | | | H0581: 1, S0049: 1, H0194: 1, H0050: 1, |
| | | | | H0057: 1, H0014: 1, L0163: 1, H0328: 1, H0615: 1, H0428: 1, H0030: 1, H0031: 1, H0617: 1, H0606: 1, H0032: 1, H0674: 1, S0364: 1, |
| | | | | H0163: 1, H0616: 1, H0264: 1, H0412: 1, |
| | | | | H0059: 1, T0069: 1, H0100: 1, T0041: 1, T0042: 1, H0494: 1, H0625: 1, S0438: 1, H0641: 1, S0344: 1, S0002: 1, S0426: 1, H0743: 1, L0369: 1, L0763: 1, L0761: 1, L0630: 1, |
| | | | | L0772: 1, L0381: 1, L0375: 1, L0806: 1, L0776: 1, L0655: 1, L0629: 1, L0658: 1, L0783: 1, L0809: 1, L0787: 1, L0664: 1, L0710: 1, H0144: 1, L3825: 1, H0520: 1, H0689: 1, |
| | | | | H0659: 1, H0651: 1, S0380: 1, H0214: 1, H0478: 1, S0028: 1, L0741: 1, L0755: 1, S0436: 1, L0588: 1, S0011: 1, S0192: 1, H0543: 1, H0423: 1, S0456: 1 and H0008: 1. |
| 93 | HLTHG37 | 787530 | 103 | AR161: 12, AR162: 12, AR163: 11, AR290: 10, AR269: 9, AR176: 8, AR241: 7, AR254: 7, AR268: 7, AR252: 7, AR180: 7, AR267: 7, |
| | | | | AR235: 7, AR182: 7, AR270: 7, AR172: 6, |
| | | | | AR165: 6, AR190: 6, AR164: 6, AR173: 6, AR236: 6, AR249: 6, AR166: 6, AR218: 6, AR183: 6, AR275: 6, AR181: 6, AR228: 6, AR250: 6, AR215: 6, AR178: 6, AR174: 5, |
| | | | | AR251: 5, AR191: 5, AR293: 5, AR193: 5, AR189: 5, AR231: 5, AR186: 5, AR263: 5, AR310: 5, AR210: 5, AR188: 5, AR274: 5, AR224: 5, AR175: 5, AR238: 5, AR171: 5, |
| | | | | AR239: 5, AR253: 5, AR299: 5, AR246: 5, AR233: 5, AR255: 5, AR244: 5, AR205: 5, AR261: 4, AR272: 4, AR262: 4, AR206: 4, AR219: 4, AR264: 4, AR089: 4, AR198: 4, |
| | | | | AR288: 4, AR257: 4, AR271: 4, AR168: 4, AR053: 4, AR311: 4, AR312: 4, AR289: 4, AR201: 4, AR291: 4, AR284: 4, AR216: 4, AR243: 4, AR177: 4, AR248: 4, AR196: 4, |
| | | | | AR282: 4, AR200: 4, AR199: 4, AR223: 4, AR195: 4, AR226: 4, AR229: 4, AR203: 4, AR237: 4, AR313: 4, AR192: 4, AR104: 4, AR294: 4, AR273: 4, AR297: 4, AR207: 4, |
| | | | | AR298: 4, AR295: 4, AR169: 3, AR217: 3, AR287: 3, AR266: 3, AR222: 3, AR184: 3, AR052: 3, AR240: 3, AR061: 3, AR033: 3, AR179: 3, AR265: 3, AR300: 3, AR242: 3, |
| | | | | AR232: 3, AR213: 3, AR234: 3, AR230: 3, AR286: 3, AR316: 3, AR285: 3, AR185: 3, AR060: 3, AR309: 3, AR096: 3, AR277: 3, AR280: 3, AR197: 3, AR260: 3, AR296: 3, |
| | | | | AR204: 3, AR258: 3, AR227: 3, AR292: 3, AR247: 3, AR211: 2, AR214: 2, AR212: 2, AR039: 2, AR055: 2, AR256: 2, AR308: 2, AR225: 2, AR170: 2, AR281: 2, AR259: 2, |
| | | | | AR314: 1, AR315: 1, L0439: 6, L0749: 4, H0144: 3, L0438: 3, L0748: 3, L0754: 3, H0251: 2, H0591: 2, H0561: 2, L0770: 2, S0126: 2, S0136: 2, L0751: 2, L0756: 2, L0755: 2, |
| | | | | H0740: 1, S0282: 1, S0035: 1, S0358: 1, S0376: 1, S0360: 1, H0580: 1, S0046: 1, H0351: 1, S0222: 1, H0438: 1, H0586: 1, H0587: 1, H0486: 1, L0021: 1, H0570: 1, S0003: 1, |
| | | | | H0328: 1, H0428: 1, T0023: 1, H0628: 1, H0032: 1, H0040: 1, T0067: 1, H0268: 1, H0412: 1, H0413: 1, S0210: 1, L0662: 1, L0803: 1, L0606: 1, L0659: 1, L0789: 1, L0663: 1, |
| | | | | S0428: 1, H0689: 1, H0435: 1, S0380: 1, H0555: 1, L0745: 1, L0747: 1, L0750: 1, L0779: 1, L0758: 1, L0759: 1, S0260: 1, L0608: 1 and S0412: 1. |
| | HLTHG37 | 743169 | 236 | |
| 94 | HLWAE11 | 783071 | 104 | AR242: 67, AR192: 47, AR164: 43, AR173: 37, AR165: 37, AR161: 36, AR195: 36, AR313: 35, AR162: 35, AR198: 34, AR166: 33, AR204: 32, AR212: 32, AR193: 30, |
| | | | | AR163: 30, AR197: 29, AR277: 28, AR275: 28, AR245: 27, AR213: 26, AR243: 26, AR207: 26, AR053: 26, AR257: 25, AR312: 25, AR299: 25, AR264: 24, AR254: 24, |
| | | | | AR191: 23, AR247: 23, AR308: 23, AR205: 22, AR274: 21, AR189: 21, AR263: 21, AR311: 21, AR271: 20, AR039: 19, AR104: 19, AR201: 19, AR240: 19, AR300: 19, |
| | | | | AR199: 18, AR246: 17, AR188: 17, AR089: 17, AR309: 17, AR253: 16, AR272: 15, AR252: 15, AR282: 14, AR185: 14, AR033: 13, AR250: 12, AR096: 12, AR316: 12, |
| | | | | AR203: 12, AR190: 11, AR176: 11, AR175: 10, AR214: 10, AR060: 10, AR258: 9, AR177: 9, AR168: 9, AR270: 8, AR283: 8, AR180: 8, AR174: 8, AR217: 8, AR235: 7, |
| | | | | AR196: 7, AR293: 7, AR216: 7, AR170: 7, AR262: 7, AR171: 7, AR181: 7, AR236: 7, AR169: 6, AR229: 6, AR297: 6, AR224: 6, AR268: 6, AR286: 6, AR295: 6, AR261: 6, |
| | | | | AR172: 6, AR178: 5, AR222: 5, AR238: 5, AR285: 5, AR223: 5, AR221: 5, AR269: 5, AR183: 5, AR179: 5, AR234: 5, AR289: 5, AR055: 5, AR288: 5, AR237: 5, AR233: 5, |
| | | | | AR215: 5, AR296: 5, AR200: 5, AR255: 4, AR061: 4, AR287: 4, AR294: 4, AR226: 4, AR225: 4, AR230: 4, AR231: 4, AR291: 4, AR290: 4, AR182: 4, AR239: 4, AR266: 3, |
| | | | | AR227: 3, AR211: 3, AR228: 3, AR210: 3, AR256: 3, AR260: 3, AR219: 3, AR267: 3, AR232: 3, AR218: 2, H0056: 2, H0050: 1, H0266: 1, H0553: 1, H0521: 1 and L0748: 1. |
| 95 | HLWAY54 | 658702 | 105 | AR245: 7, AR263: 5, AR197: 5, AR170: 5, AR215: 5, AR162: 5, AR264: 5, AR163: 5, AR161: 4, AR309: 4, AR308: 4, AR246: 4, AR275: 4, AR165: 4, AR164: 4, AR166: 4, |
| | | | | AR192: 4, AR053: 4, AR272: 4, AR235: 4, AR271: 3, AR312: 3, AR212: 3, AR198: 3, AR213: 3, AR311: 3, AR282: 3, AR172: 3, AR254: 3, AR225: 3, AR240: 3, AR250: 3, |
| | | | | AR296: 3, AR217: 3, AR261: 2, AR171: 2, AR201: 2, AR193: 2, AR033: 2, AR238: 2, AR313: 2, AR257: 2, AR176: 2, AR203: 2, AR289: 2, AR274: 2, AR216: 2, AR295: 2, |
| | | | | AR104: 2, AR060: 2, AR096: 2, AR285: 2, AR243: 2, AR221: 2, AR200: 2, AR286: 2, AR291: 2, AR277: 2, AR283: 2, AR316: 2, AR089: 2, AR195: 2, AR226: 2, AR287: 2, |
| | | | | AR173: 2, AR229: 2, AR239: 2, AR175: 2, AR055: 2, AR300: 2, AR185: 2, AR227: 2, AR061: 2, AR039: 1, AR299: 1, AR196: 1, AR266: 1, AR183: 1, AR224: 1, AR205: 1, |
| | | | | AR267: 1, AR190: 1, AR247: 1, AR191: 1, AR297: 1, AR182: 1, AR294: 1, AR232: 1, AR258: 1, AR233: 1, AR269: 1, AR177: 1, AR230: 1, AR188: 1, AR262: 1, AR236: 1, |
| | | | | H0618: 18, H0253: 17, L0758: 11, H0038: 4, H0657: 2, H0616: 2, S0116: 1, S0001: 1, H0421: 1, H0553: 1, L0764: 1, L0768: 1, L0780: 1 and H0445: 1. |
| 96 | HLWCF05 | 460619 | 106 | AR196: 15, AR235: 9, AR271: 8, AR261: 8, AR309: 8, AR214: 7, AR188: 7, AR199: 7, AR191: 7, AR223: 6, AR263: 6, AR218: 6, AR189: 6, AR222: 6, AR198: 5, AR165: 5, |
| | | | | AR312: 5, AR164: 5, AR275: 5, AR295: 5, AR166: 5, AR240: 5, AR308: 5, AR190: 5, AR311: 5, AR282: 4, AR264: 4, AR224: 4, AR161: 4, AR162: 4, AR096: 4, AR216: 4, |
| | | | | AR163: 4, AR217: 4, AR039: 4, AR195: 4, AR089: 4, AR296: 4, AR177: 4, AR246: 4, AR285: 4, AR288: 4, AR200: 4, AR210: 4, AR219: 4, AR175: 4, AR183: 4, AR168: 4, |
| | | | | AR236: 4, AR207: 4, AR253: 4, AR174: 4, AR299: 4, AR178: 4, AR192: 3, AR060: 3, AR203: 3, AR316: 3, AR181: 3, AR238: 3, AR213: 3, AR257: 3, AR212: 3, AR237: 3, |
| | | | | AR245: 3, AR173: 3, AR268: 3, AR242: 3, AR250: 3, AR104: 3, AR274: 3, AR182: 3, AR272: 3, AR270: 3, AR269: 3, AR291: 3, AR221: 3, AR053: 3, AR262: 3, AR225: 3, |
| | | | | AR258: 3, AR226: 3, AR289: 3, AR176: 3, AR232: 2, AR234: 2, AR193: 2, AR277: 2, AR211: 2, AR239: 2, AR267: 2, AR300: 2, AR287: 2, AR172: 2, AR205: 2, AR297: 2, |
| | | | | AR294: 2, AR180: 2, AR231: 2, AR313: 2, AR185: 2, AR229: 2, AR171: 2, AR033: 2, AR286: 2, AR290: 2, AR293: 2, AR197: 2, AR233: 2, AR215: 2, AR243: 2, AR201: 2, |
| | | | | AR061: 2, AR227: 2, AR179: 2, AR228: 2, AR283: 1, AR255: 1, AR247: 1, AR260: 1, AR230: 1, AR266: 1, L0439: 9, L0766: 7, H0521: 5, L0740: 5, L0758: 5, S0010: 4, |
| | | | | L0749: 4, H0038: 3, L0805: 3, L0748: 3, L0777: 3, H0657: 2, H0341: 2, S0418: 2, S0444: 2, S0410: 2, H0747: 2, S0476: 2, L3655: 2, H0013: 2, H0553: 2, H0032: 2, H0169: 2, |
| | | | | L0455: 2, H0040: 2, S0422: 2, H0529: 2, L0667: 2, L0662: 2, L0768: 2, L0519: 2, L0754: 2, L0745: 2, L0747: 2, L0750: 2, L0779: 2, L0731: 2, S0434: 2, S0436: 2, L0592: 2, |
| | | | | S0412: 2, H0556: 1, T0002: 1, S0114: 1, S0116: 1, L0879: 1, H0638: 1, S0420: 1, S0356: 1, S0358: 1, S0376: 1, S0408: 1, L1499: 1, H0749: 1, H0619: 1, L2817: 1, L3485: 1, |
| | | | | H0586: 1, H0587: 1, H0333: 1, H0574: 1, H0632: 1, T0039: 1, L1788: 1, L1877: 1, L0021: 1, L0022: 1, H0575: 1, S0474: 1, H0581: 1, |
| | | | | H0457: 1, H0320: 1, H0014: 1, L0163: 1, |
| | | | | H0375: 1, H0188: 1, S0250: 1, L0483: 1, H0598: 1, H0163: 1, H0591: 1, H0616: 1, H0623: 1, H0100: 1, H0494: 1, S0440: 1, L0598: 1, L0763: 1, L0769: 1, L0638: 1, L0800: 1, |
| | | | | L0641: 1, L0794: 1, L0803: 1, L0775: 1, L0806: 1, L0776: 1, L0527: 1, L0659: 1, L0635: 1, L0787: 1, L0789: 1, L0666: 1, L0663: 1, L0664: 1, L0665: 1, S0428: 1, L2653: 1, |
| | | | | L2261: 1, H0519: 1, H0435: 1, H0670: 1, H0672: 1, H0539: 1, H0696: 1, S0406: 1, H0436: 1, H0727: 1, L0755: 1, L0485: 1, H0423: 1 and H0506: 1. |
| 97 | HLYAF80 | 460622 | 107 | AR169: 9, AR263: 9, AR221: 8, AR253: 7, AR207: 7, AR171: 7, AR217: 7, AR168: 7, AR224: 7, AR309: 7, AR223: 6, AR235: 6, AR242: 6, AR225: 6, AR215: 6, AR311: 6, |
| | | | | AR172: 6, AR282: 6, AR053: 6, AR192: 6, AR245: 5, AR264: 5, AR216: 5, AR170: 5, AR165: 5, AR214: 5, AR164: 5, AR195: 5, AR308: 5, AR212: 5, AR166: 5, AR198: 5, |
| | | | | AR261: 5, AR089: 5, AR252: 5, AR222: 5, AR213: 5, AR161: 5, AR162: 5, AR163: 4, AR246: 4, AR274: 4, AR275: 4, AR277: 4, AR240: 4, AR312: 4, AR205: 4, AR316: 4, |
| | | | | AR286: 4, AR096: 4, AR283: 4, AR193: 4, AR196: 4, AR060: 4, AR199: 3, AR272: 3, AR295: 3, AR288: 3, AR176: 3, AR177: 3, AR313: 3, AR181: 3, AR033: 3, AR185: 3, |
| | | | | AR200: 3, AR271: 3, AR297: 3, AR175: 3, AR289: 3, AR236: 3, AR300: 3, AR291: 3, AR270: 3, AR296: 3, AR254: 3, AR247: 3, AR285: 3, AR201: 3, AR257: 3, AR203: 3, |
| | | | | AR104: 3, AR299: 3, AR269: 3, AR262: 3, AR174: 2, AR180: 2, AR197: 2, AR173: 2, AR238: 2, AR287: 2, AR190: 2, AR255: 2, AR268: 2, AR039: 2, AR294: 2, AR189: 2, |
| | | | | AR239: 2, AR293: 2, AR231: 2, AR188: 2, AR234: 2, AR055: 2, AR191: 2, AR290: 2, AR267: 2, AR226: 2, AR266: 2, AR183: 2, AR232: 2, AR237: 2, AR230: 2, AR233: 2, |
| | | | | AR227: 2, AR178: 2, AR228: 2, AR061: 2, AR210: 1, AR219: 1, AR211: 1, AR182: 1, AR256: 1, AR218: 1, AR258: 1, AR179: 1, AR243: 1, AR260: 1, AR229: 1, H0445: 1, |
| 98 | HLYAZ61 | 1352163 | 108 | AR309: 19, AR310: 16, AR312: 13, AR184: 8, AR311: 7, AR244: 5, AR265: 5, AR308: 5, AR241: 4, AR039: 4, AR052: 4, |
| | | | | AR096: 4, AR282: 4, AR206: 3, AR316: 3, AR161: 3, |
| | | | | AR162: 3, AR163: 3, AR263: 3, AR183: 3, AR205: 3, AR266: 3, AR267: 3, AR170: 2, AR254: 2, AR264: 2, AR277: 2, AR053: 2, AR243: 2, AR313: 2, AR186: 2, AR270: 2, |
| | | | | AR173: 2, AR299: 2, AR246: 2, AR253: 2, AR193: 2, AR298: 2, AR165: 2, AR268: 2, AR290: 2, AR213: 2, AR269: 1, AR166: 1, AR274: 1, AR216: 1, AR182: 1, AR224: 1, |
| | | | | AR192: 1, AR178: 1, AR061: 1, AR169: 1, AR238: 1, AR272: 1, AR233: 1, AR229: 1, AR164: 1, AR296: 1, AR275: 1, AR089: 1, AR257: 1, AR217: 1, AR261: 1, AR226: 1, |
| | | | | AR189: 1, AR295: 1, AR060: 1, AR240: 1, AR285: 1, AR185: 1, AR289: 1, AR293: 1, H0542: 2, H0543: 2, H0556: 1, S0114: 1, S0134: 1, H0641: 1, L0664: 1, H0445: 1, |
| | | | | H0423: 1, H0422: 1 and L3377: 1. |
| | HLYAZ61 | 423998 | 237 | |
| 99 | HMADS41 | 596831 | 109 | AR218: 19, AR219: 19, AR283: 12, AR096: 12, AR313: 11, AR316: 10, AR240: 10, AR300: 9, AR185: 9, AR055: 9, AR277: 9, AR039: 8, AR089: 8, AR282: 8, AR060: 8, |
| | | | | AR299: 7, AR104: 7, L0794: 4, L0375: 3, H0575: 2, L0800: 2, L0789: 2, H0556: 1, H0662: 1, S0418: 1, H0619: 1, H0549: 1, H0590: 1, |
| | | | | H0052: 1, H0083: 1, H0266: 1, H0286: 1, |
| | | | | H0644: 1, S0036: 1, H0433: 1, H0412: 1, H0413: 1, T0042: 1, S0144: 1, S0142: 1, S0344: 1, L0770: 1, L0761: 1, L0774: 1, H0518: 1, L0777: 1, L0758: 1 and H0665: 1. |
| 100 | HMADU73 | 1352177 | 110 | AR283: 25, AR089: 23, AR055: 18, AR219: 17, AR316: 16, AR218: 15, AR096: 15, AR277: 13, AR282: 13, AR104: 13, AR171: 13, AR299: 12, AR060: 12, AR039: 12, |
| | | | | AR313: 11, AR240: 7, AR185: 7, AR309: 5, AR312: 5, AR308: 5, AR300: 5, AR170: 4, AR223: 3, AR193: 3, AR168: 3, AR245: 3, AR215: 3, AR165: 3, AR176: 3, AR164: 3, |
| | | | | AR216: 3, AR166: 3, AR198: 3, AR311: 3, AR053: 3, AR221: 2, AR266: 2, AR264: 2, AR212: 2, AR225: 2, AR201: 2, AR033: 2, AR169: 2, AR224: 2, AR271: 2, AR246: 2, |
| | | | | AR274: 2, AR177: 2, AR275: 2, AR172: 2, AR207: 2, AR161: 2, AR162: 2, AR213: 2, AR163: 2, AR295: 1, AR268: 1, AR205: 1, AR196: 1, AR262: 1, AR272: 1, AR296: 1, |
| | | | | AR253: 1, AR175: 1, AR290: 1, AR195: 1, AR288: 1, AR267: 1, H0521: 2, S0436: 2, S0358: 1, S0360: 1, H0266: 1, S0144: 1, L0646: 1, |
| | | | | L0655: 1, L0791: 1, L0666: 1, H0435: 1, |
| | | | | H0660: 1, S0152: 1 and H0665: 1. |
| | HMADU73 | 467053 | 238 | |
| 101 | HMIAL37 | 603201 | 111 | AR266: 6, AR207: 6, AR176: 6, AR217: 5, AR162: 5, AR161: 5, AR225: 5, AR163: 5, AR183: 5, AR182: 5, AR269: 5, AR245: 5, AR223: 5, AR214: 4, AR288: 4, AR205: 4, |
| | | | | AR309: 4, AR181: 4, AR270: 4, AR267: 4, AR291: 4, AR216: 4, AR215: 4, AR261: 4, AR242: 4, AR274: 4, AR171: 4, AR289: 3, AR233: 3, AR235: 3, AR177: 3, AR195: 3, |
| | | | | AR175: 3, AR286: 3, AR053: 3, AR287: 3, AR198: 3, AR268: 3, AR294: 3, AR236: 3, AR237: 3, AR255: 3, AR228: 3, AR180: 3, AR238: 3, AR257: 3, AR173: 3, AR172: 3, |
| | | | | AR311: 3, AR271: 3, AR290: 3, AR293: 3, AR191: 3, AR179: 3, AR201: 3, AR192: 3, AR221: 3, AR229: 3, AR285: 3, AR247: 3, AR296: 3, AR275: 3, AR061: 3, AR199: 3, |
| | | | | AR193: 2, AR165: 2, AR230: 2, AR166: 2, AR170: 2, AR164: 2, AR190: 2, AR243: 2, AR222: 2, AR178: 2, AR262: 2, AR060: 2, AR039: 2, AR231: 2, AR256: 2, AR204: 2, |
| | | | | AR260: 2, AR200: 2, AR168: 2, AR297: 2, AR189: 2, AR188: 2, AR234: 2, AR239: 2, AR282: 2, AR316: 2, AR240: 2, AR272: 2, AR096: 2, AR295: 2, AR258: 2, AR224: 2, |
| | | | | AR300: 2, AR226: 2, AR203: 2, AR232: 2, AR196: 2, AR246: 2, AR104: 2, AR213: 1, AR185: 1, AR299: 1, AR227: 1, AR089: 1, AR277: 1, AR312: 1, AR308: 1, AR169: 1, |
| | | | | AR033: 1, AR055: 1, AR174: 1, S0354: 2, H0549: 2, S0442: 1, S0360: 1, S0010: 1, S0050: 1, H0015: 1, S6028: 1, H0622: 1, S0038: 1, S0440: 1, S0436: 1 and L0596: 1. |
| 102 | HMKCG09 | 548078 | 112 | AR202: 39, AR292: 25, AR280: 25, AR315: 25, AR104: 24, AR310: 24, AR284: 23, AR312: 20, AR052: 20, AR281: 19, AR314: 19, AR309: 19, AR275: 19, AR266: 18, |
| | | | | AR186: 18, AR033: 17, AR060: 17, AR295: 17, AR285: 17, AR283: 16, AR298: 16, AR259: 16, AR055: 15, AR273: 14, AR271: 14, AR192: 13, AR277: 13, AR286: 13, |
| | | | | AR204: 13, AR185: 12, AR253: 12, AR184: 12, AR250: 12, AR289: 11, AR251: 11, AR291: 11, AR241: 10, AR218: 10, AR096: 10, AR294: 10, AR299: 10, AR274: 10, |
| | | | | AR265: 9, AR316: 9, AR293: 9, AR183: 9, AR313: 9, AR219: 9, AR089: 9, AR213: 8, AR282: 8, AR254: 8, AR272: 8, AR270: 8, AR244: 7, AR039: 7, AR238: 7, AR269: 7, |
| | | | | AR256: 7, AR258: 7, AR201: 7, AR296: 7, AR182: 7, AR177: 6, AR175: 6, AR205: 6, AR195: 6, AR247: 6, AR268: 6, AR248: 6, AR198: 6, AR300: 5, AR232: 5, AR231: 5, |
| | | | | AR290: 5, AR053: 5, AR206: 5, AR249: 5, AR263: 5, AR061: 5, AR267: 5, AR165: 4, AR164: 4, AR226: 4, AR252: 4, AR237: 4, AR214: 4, AR166: 4, AR215: 4, AR229: 3, |
| | | | | AR207: 3, AR212: 3, AR240: 3, AR257: 3, AR191: 3, AR171: 3, AR264: 3, AR227: 3, AR170: 3, AR262: 3, AR173: 3, AR233: 3, AR199: 2, AR243: 2, AR246: 2, AR297: 2, |
| | | | | AR236: 2, AR180: 2, AR196: 2, AR197: 2, AR179: 2, AR188: 2, AR234: 2, AR189: 2, AR228: 2, AR223: 2, AR168: 2, AR190: 2, AR200: 2, AR288: 2, AR225: 2, AR239: 2, |
| | | | | AR261: 1, AR287: 1, AR308: 1, AR193: 1, AR181: 1, AR216: 1, AR224: 1, AR255: 1, AR174: 1, L0766: 7, L0803: 7, S0466: 2, L0805: 2, L3387: 1, H0392: 1, H0156: 1, |
| | | | | L0021: 1, H0052: 1, L0770: 1, L0804: 1, L0788: 1, H0756: 1, L0743: 1, L0755: 1, L0731: 1 and L0361: 1. |
| 103 | HMMAH60 | 562776 | 113 | AR242: 10, AR313: 9, AR192: 9, AR196: 7, AR173: 7, AR165: 7, AR089: 7, AR164: 6, AR197: 6, AR039: 6, AR161: 6, AR162: 6, AR245: 6, AR163: 6, AR193: 5, AR053: 5, |
| | | | | AR299: 5, AR183: 5, AR175: 5, AR271: 5, AR257: 5, AR204: 4, AR174: 4, AR033: 4, AR261: 4, AR096: 4, AR300: 4, AR178: 4, AR229: 4, AR240: 4, AR262: 4, AR199: 4, |
| | | | | AR252: 4, AR191: 4, AR243: 4, AR189: 4, AR293: 4, AR177: 4, AR247: 4, AR264: 4, AR179: 4, AR180: 4, AR238: 4, AR269: 4, AR235: 4, AR166: 4, AR182: 4, AR250: 4, |
| | | | | AR201: 4, AR195: 4, AR203: 4, AR170: 4, AR218: 4, AR213: 4, AR296: 3, AR060: 3, AR316: 3, AR258: 3, AR275: 3, AR205: 3, AR200: 3, AR236: 3, AR185: 3, AR270: 3, |
| | | | | AR176: 3, AR285: 3, AR234: 3, AR297: 3, AR272: 3, AR312: 3, AR188: 3, AR277: 3, AR104: 3, AR221: 3, AR198: 3, AR230: 3, AR226: 3, AR266: 3, AR210: 3, AR233: 3, |
| | | | | AR237: 3, AR268: 3, AR239: 3, AR216: 3, AR231: 3, AR181: 3, AR288: 3, AR222: 3, AR290: 3, AR211: 3, AR294: 2, AR190: 2, AR267: 2, AR286: 2, AR282: 2, AR274: 2, |
| | | | | AR291: 2, AR171: 2, AR295: 2, AR228: 2, AR287: 2, AR207: 2, AR246: 2, AR308: 2, AR219: 2, AR255: 2, AR212: 2, AR223: 2, AR227: 2, AR260: 2, AR225: 2, AR232: 2, |
| | | | | AR215: 2, AR217: 1, AR253: 1, AR055: 1, AR061: 1, L0547: 1 and H0444: 1. |
| 104 | HMQDT36 | 1309723 | 114 | AR218: 25, AR219: 21, AR096: 17, AR039: 13, AR316: 13, AR089: 12, AR299: 9, AR055: 9, AR282: 9, AR060: 8, AR252: 7, AR185: 7, AR313: 7, AR277: 6, AR240: 6, |
| | | | | AR300: 6, AR104: 5, AR283: 4, AR263: 4, AR164: 4, AR192: 4, AR243: 4, AR253: 3, AR170: 3, AR212: 3, AR269: 3, AR224: 3, AR286: 3, AR204: 3, AR264: 3, AR180: 3, |
| | | | | AR296: 2, AR293: 2, AR247: 2, AR246: 2, AR196: 2, AR168: 2, AR295: 2, AR165: 2, AR289: 2, AR176: 2, AR214: 2, AR053: 2, AR271: 2, AR175: 2, AR268: 2, AR171: 2, |
| | | | | AR234: 2, AR222: 2, AR178: 2, AR275: 2, AR213: 1, AR182: 1, AR173: 1, AR267: 1, AR285: 1, AR225: 1, AR183: 1, AR189: 1, AR195: 1, AR201: 1, AR308: 1, AR312: 1, |
| | | | | AR239: 1, AR174: 1, AR181: 1, AR193: 1, AR172: 1, L0754: 10, L0748: 9, L0770: 8, H0521: 8, S0003: 7, S0356: 5, L0751: 5, S0436: 5, |
| | | | | S0358: 4, S0360: 4, H0494: 4, L0764: 4, |
| | | | | L0803: 4, L0731: 4, H0580: 3, H0615: 3, H0591: 3, H0040: 3, H0623: 3, S0422: 3, L0771: 3, L0776: 3, L0666: 3, S0406: 3, L0752: 3, S0434: 3, H0542: 3, S0212: 2, H0255: 2, |
| | | | | H0638: 2, S0418: 2, L0005: 2, S0442: 2, S0376: 2, S0408: 2, S0045: 2, S0476: 2, H0497: 2, H0231: 2, H0266: 2, H0179: 2, S0214: 2, H0622: 2, H0124: 2, H0551: 2, S0440: 2, |
| | | | | L0805: 2, L0809: 2, S0374: 2, H0547: 2, H0660: 2, H0648: 2, H0709: 2, L0740: 2, L0759: 2, H0445: 2, L0596: 2, L0599: 2, H0506: 2, |
| | | | | H0556: 1, T0002: 1, H0713: 1, H0717: 1, |
| | | | | L3404: 1, T0049: 1, S0218: 1, H0583: 1, H0341: 1, L3658: 1, S0354: 1, S0444: 1, H0730: 1, H0741: 1, H0208: 1, H0749: 1, H0351: 1, H0549: 1, H0550: 1, S0222: 1, H0331: 1, |
| | | | | H0574: 1, H0250: 1, H0069: 1, H0635: 1, H0427: 1, S0280: 1, T0071: 1, H0263: 1, H0596: 1, H0046: 1, H0123: 1, H0014: 1, H0354: 1, |
| | | | | H0375: 1, H0428: 1, H0039: 1, T0023: 1, |
| | | | | L0483: 1, T0006: 1, H0031: 1, L0142: 1, L0143: 1, L0055: 1, H0673: 1, S0366: 1, H0598: 1, H0038: 1, H0634: 1, H0269: 1, H0059: 1, |
| | | | | H0429: 1, H0561: 1, S0438: 1, H0509: 1, |
| | | | | S0150: 1, H0646: 1, H0652: 1, S0142: 1, S0210: 1, S0002: 1, S0426: 1, H0529: 1, L0637: 1, L0800: 1, L0662: 1, L0767: 1, L0387: 1, L0766: 1, L0388: 1, L0522: 1, L0804: 1, |
| | | | | L0774: 1, L0775: 1, L0378: 1, L0806: 1, L0652: 1, L0654: 1, L0655: 1, L0661: 1, L0657: 1, L0659: 1, L0647: 1, L5623: 1, L0664: 1, S0052: 1, S0428: 1, L3819: 1, H0701: 1, |
| | | | | T0068: 1, L3811: 1, S0126: 1, H0682: 1, H0659: 1, H0670: 1, S0378: 1, H0518: 1, S0152: 1, H0696: 1, S0146: 1, L0758: 1, L0608: 1, H0667: 1, S0192: 1, S0242: 1, S0194: 1, |
| | | | | H0543: 1, H0423: 1 and H0422: 1. |
| | HMQDT36 | 424085 | 239 | |
| 105 | HMSHS36 | 1127691 | 115 | AR039: 6, AR055: 5, AR218: 5, AR060: 5, AR300: 5, AR185: 4, AR313: 4, AR299: 4, AR240: 4, AR104: 3, AR316: 3, AR096: 3, AR282: 3, AR089: 3, AR283: 2, AR277: 1, |
| | | | | S0002: 1 |
| | HMSHS36 | 1028961 | 240 | |
| 106 | HMSJU68 | 427121 | 116 | AR089: 10, AR055: 9, AR060: 7, AR039: 7, AR185: 7, AR313: 7, AR300: 6, AR218: 6, AR316: 5, AR240: 5, AR104: 5, AR096: 5, AR299: 4, AR283: 4, AR277: 3, AR282: 3, |
| | | | | AR219: 2, L0560: 5, L0545: 4, S0002: 2, L5574: 2, H0240: 1, S0046: 1, H0333: 1, H0597: 1, H0014: 1, L5569: 1, L0533: 1, L0519: 1, L0544: 1, S0374: 1, H0520: 1, S0454: 1, |
| | | | | S0406: 1 and L3813: 1. |
| 107 | HMSKC04 | 799540 | 117 | AR313: 12, AR173: 10, AR161: 9, AR162: 9, AR163: 9, AR258: 7, AR196: 7, AR175: 7, AR257: 7, AR240: 7, AR247: 6, AR262: 6, |
| | | | | AR264: 6, AR180: 6, AR096: 6, AR179: 6, |
| | | | | AR183: 6, AR185: 6, AR269: 6, AR176: 6, AR274: 6, AR234: 6, AR299: 5, AR191: 5, AR233: 5, AR229: 5, AR181: 5, AR293: 5, AR178: 5, AR291: 5, AR300: 5, AR287: 5, |
| | | | | AR270: 5, AR089: 5, AR275: 5, AR236: 5, AR255: 5, AR266: 5, AR218: 5, AR296: 4, AR199: 4, AR294: 4, AR231: 4, AR238: 4, AR177: 4, AR182: 4, AR268: 4, AR297: 4, |
| | | | | AR226: 4, AR260: 4, AR174: 4, AR219: 4, AR228: 4, AR261: 4, AR267: 4, AR203: 4, AR316: 4, AR200: 4, AR285: 4, AR290: 4, AR288: 3, AR239: 3, AR215: 3, AR309: 3, |
| | | | | AR189: 3, AR230: 3, AR286: 3, AR237: 3, AR172: 3, AR295: 3, AR190: 3, AR245: 3, AR033: 3, AR188: 3, AR217: 3, AR053: 3, AR312: 3, AR311: 3, AR060: 3, AR272: 3, |
| | | | | AR104: 2, AR165: 2, AR164: 2, AR250: 2, AR166: 2, AR282: 2, AR263: 2, AR227: 2, AR232: 2, AR171: 2, AR243: 2, AR170: 2, AR289: 2, AR308: 2, AR039: 2, AR213: 2, |
| | | | | AR061: 2, AR055: 2, AR210: 2, AR225: 2, AR256: 2, AR212: 1, AR235: 1, AR211: 1, AR193: 1, AR216: 1, AR201: 1, AR205: 1, H0264: 2, S0002: 2, S0114: 1 and H0416: 1. |
| 108 | HMTAD67 | 588447 | 118 | AR313: 17, AR196: 14, AR173: 13, AR165: 11, AR161: 10, AR164: 10, AR162: 10, AR166: 10, AR242: 10, AR163: 10, AR180: 10, |
| | | | | AR096: 10, AR089: 9, AR240: 9, AR262: 8, |
| | | | | AR178: 8, AR247: 8, AR258: 8, AR200: 8, AR296: 8, AR185: 8, AR191: 8, AR175: 8, AR300: 7, AR234: 7, AR179: 7, AR238: 7, AR236: 7, AR257: 7, AR183: 7, AR264: 7, |
| | | | | AR199: 7, AR213: 7, AR169: 7, AR229: 7, AR181: 6, AR168: 6, AR299: 6, AR219: 6, AR297: 6, AR287: 6, AR293: 6, AR170: 6, AR060: 6, AR218: 6, AR203: 6, AR177: 6, |
| | | | | AR182: 6, AR192: 6, AR316: 6, AR215: 6, AR171: 6, AR104: 5, AR261: 5, AR174: 5, AR255: 5, AR291: 5, AR274: 5, AR263: 5, AR294: 5, AR212: 5, AR188: 5, AR312: 5, |
| | | | | AR275: 5, AR039: 5, AR245: 5, AR207: 5, AR226: 5, AR230: 5, AR282: 5, AR233: 5, AR053: 5, AR269: 5, AR270: 5, AR189: 5, AR033: 5, AR223: 5, AR285: 4, AR237: 4, |
| | | | | AR231: 4, AR260: 4, AR277: 4, AR268: 4, AR204: 4, AR214: 4, AR254: 4, AR286: 4, AR228: 4, AR290: 4, AR176: 4, AR235: 4, AR272: 4, AR311: 4, AR239: 3, AR288: 3, |
| | | | | AR295: 3, AR193: 3, AR211: 3, AR309: 3, AR217: 3, AR308: 3, AR266: 3, AR283: 3, AR252: 3, AR172: 3, AR267: 3, AR198: 3, AR227: 3, AR246: 3, AR190: 3, AR222: 2, |
| | | | | AR289: 2, AR210: 2, AR271: 2, AR061: 2, AR205: 2, AR225: 2, AR201: 1, AR256: 1, AR232: 1, AR195: 1, AR216: 1, AR243: 1, L0439: 9, S0440: 8, L0438: 7, H0521: 5, |
| | | | | S0040: 3, H0556: 2, S0222: 2, H0457: 2, H0024: 2, H0687: 2, H0031: 2, H0264: 2, H0488: 2, H0494: 2, H0529: 2, L5622: 2, L0663: 2, |
| | | | | L0751: 2, L0596: 2, H0265: 1, L3644: 1, |
| | | | | S0134: 1, H0484: 1, H0661: 1, H0638: 1, S0418: 1, S0442: 1, L3713: 1, H0733: 1, S0045: 1, H0749: 1, H0261: 1, H0370: 1, H0590: 1, |
| | | | | H0618: 1, H0253: 1, H0194: 1, H0083: 1, |
| | | | | H0510: 1, H0594: 1, H0266: 1, H0644: 1, H0032: 1, H0087: 1, H0272: 1, H0268: 1, H0623: 1, H0102: 1, H0561: 1, H0509: 1, L3904: 1, |
| | | | | L3905: 1, L0651: 1, L0526: 1, L2262: 1, |
| | | | | L3825: 1, L3827: 1, H0593: 1, L0602: 1, H0518: 1, H0436: 1, H0478: 1, S3012: 1, S0028: 1, L0731: 1, S0436: 1, L0605: 1, L0601: 1, |
| | | | | H0667: 1, S0194: 1, H0543: 1, H0506: 1 and |
| | | | | H0008: 1. |
| 109 | HMWFO02 | 1352198 | 119 | AR173: 11, AR258: 8, AR178: 8, AR175: 8, AR313: 7, AR196: 7, AR183: 7, AR262: 7, AR219: 7, AR218: 7, AR257: 6, AR182: 6, AR293: 6, AR191: 6, AR169: 6, AR179: 6, |
| | | | | AR236: 6, AR240: 6, AR180: 6, AR200: 6, AR174: 6, AR199: 6, AR229: 5, AR235: 5, AR176: 5, AR270: 5, AR261: 5, AR181: 5, AR285: 5, AR247: 5, AR161: 5, AR299: 5, |
| | | | | AR233: 5, AR162: 5, AR163: 5, AR288: 5, AR269: 5, AR268: 5, AR287: 5, AR255: 5, AR260: 5, AR226: 4, AR228: 4, AR096: 4, AR234: 4, AR189: 4, AR177: 4, AR290: 4, |
| | | | | AR296: 4, AR294: 4, AR297: 4, AR286: 4, AR300: 4, AR295: 4, AR165: 4, AR188: 4, AR267: 4, AR266: 4, AR164: 4, AR089: 4, AR237: 4, AR166: 4, AR316: 4, AR230: 4, |
| | | | | AR203: 4, AR238: 3, AR239: 3, AR282: 3, AR231: 3, AR291: 3, AR185: 3, AR216: 3, AR275: 3, AR289: 3, AR256: 3, AR168: 3, AR060: 3, AR190: 3, AR210: 3, AR264: 3, |
| | | | | AR311: 3, AR207: 3, AR250: 3, AR274: 3, AR211: 3, AR104: 3, AR223: 2, AR227: 2, AR055: 2, AR225: 2, AR033: 2, AR272: 2, AR215: 2, AR214: 2, AR232: 2, AR061: 2, |
| | | | | AR277: 2, AR224: 2, AR309: 2, AR171: 2, AR213: 2, AR312: 1, AR308: 1, H0341: 1 |
| | HMWFO02 | 542061 | 241 | |
| 110 | HMWFY10 | 825421 | 120 | AR176: 6, AR161: 6, AR162: 5, AR163: 5, AR181: 5, AR055: 5, AR269: 5, AR229: 5, AR060: 5, AR204: 5, AR228: 5, AR261: 4, AR235: 4, AR267: 4, AR309: 4, AR177: 4, |
| | | | | AR271: 4, AR183: 4, AR168: 4, AR182: 4, AR223: 4, AR252: 4, AR239: 4, AR233: 4, AR257: 4, AR255: 3, AR197: 3, AR236: 3, AR270: 3, AR291: 3, AR230: 3, AR231: 3, |
| | | | | AR238: 3, AR268: 3, AR289: 3, AR175: 3, AR275: 3, AR300: 3, AR185: 3, AR207: 3, AR193: 3, AR237: 3, AR226: 3, AR061: 3, AR165: 3, AR296: 3, AR173: 3, AR262: 3, |
| | | | | AR164: 3, AR283: 3, AR294: 3, AR290: 3, AR166: 3, AR293: 3, AR089: 3, AR254: 3, AR174: 3, AR272: 3, AR179: 3, AR221: 3, AR266: 3, AR288: 3, AR264: 3, AR178: 2, |
| | | | | AR222: 2, AR225: 2, AR201: 2, AR227: 2, AR295: 2, AR104: 2, AR171: 2, AR247: 2, AR316: 2, AR224: 2, AR190: 2, AR216: 2, AR191: 2, AR214: 2, AR232: 2, AR287: 2, |
| | | | | AR234: 2, AR096: 2, AR274: 2, AR198: 2, AR285: 2, AR286: 2, AR240: 2, AR258: 2, AR192: 2, AR277: 2, AR200: 2, AR311: 2, AR299: 2, AR203: 2, AR053: 2, AR217: 2, |
| | | | | AR196: 2, AR312: 1, AR189: 1, AR282: 1, AR188: 1, AR169: 1, AR210: 1, AR172: 1, AR033: 1, AR039: 1, AR213: 1, AR313: 1, AR180: 1, AR219: 1, AR297: 1, AR218: 1, |
| | | | | H0619: 2, H0717: 1, H0341: 1, S0036: 1, H0547: 1 and L0595: 1. |
| | HMWFY10 | 490495 | 242 | |
| 111 | HNGBT31 | 408334 | 121 | AR250: 53, AR253: 45, AR254: 36, AR245: 30, AR243: 20, AR212: 19, AR264: 19, AR263: 17, AR197: 16, AR272: 15, AR195: 15, AR308: 14, AR312: 13, AR193: 12, |
| | | | | AR240: 12, AR213: 12, AR180: 12, AR275: 11, AR246: 11, AR173: 11, AR242: 10, AR207: 10, AR311: 10, AR162: 9, AR201: 9, AR161: 9, AR165: 9, AR053: 9, AR163: 8, |
| | | | | AR164: 8, AR252: 8, AR166: 8, AR271: 8, AR199: 8, AR178: 7, AR189: 7, AR198: 7, AR176: 7, AR183: 7, AR190: 7, AR181: 7, AR096: 7, AR200: 6, AR309: 6, AR191: 6, |
| | | | | AR205: 6, AR192: 5, AR270: 5, AR196: 5, AR174: 5, AR179: 5, AR188: 4, AR268: 4, AR269: 4, AR175: 4, AR039: 4, AR290: 4, AR288: 4, AR266: 4, AR313: 4, AR247: 4, |
| | | | | AR215: 4, AR169: 4, AR255: 4, AR210: 4, AR089: 4, AR267: 3, AR235: 3, AR236: 3, AR282: 3, AR172: 3, AR291: 3, AR261: 3, AR177: 3, AR060: 3, AR257: 3, AR211: 3, |
| | | | | AR316: 3, AR202: 3, AR033: 3, AR262: 3, AR300: 3, AR185: 3, AR287: 3, AR203: 3, AR251: 3, AR182: 3, AR295: 3, AR186: 3, AR204: 3, AR297: 3, AR285: 2, AR219: 2, |
| | | | | AR234: 2, AR299: 2, AR223: 2, AR239: 2, AR228: 2, AR104: 2, AR277: 2, AR293: 2, AR214: 2, AR296: 2, AR229: 2, AR265: 2, AR233: 2, AR238: 2, AR274: 2, AR273: 2, |
| | | | | AR283: 2, AR206: 2, AR061: 2, AR237: 2, AR289: 2, AR168: 2, AR218: 2, AR184: 2, AR286: 1, AR224: 1, AR244: 1, AR230: 1, AR226: 1, AR231: 1, AR232: 1, AR055: 1, |
| | | | | AR258: 1, AR221: 1, AR260: 1, AR225: 1, S0052: 1 and L0366: 1. |
| 112 | HNGEO29 | 532622 | 122 | AR225: 5, AR195: 3, AR282: 3, AR263: 2, AR245: 2, AR216: 2, AR309: 2, AR053: 2, AR166: 2, AR165: 1, AR039: 1, AR266: 1, AR164: 1, AR213: 1, AR171: 1, AR257: 1, |
| | | | | AR296: 1, AR179: 1, AR089: 1, AR268: 1, AR055: 1, AR178: 1, AR283: 1, AR176: 1, AR192: 1, AR269: 1, AR246: 1, S0052: 1 |
| 113 | HNGIQ46 | 526651 | 123 | AR176: 7, AR235: 6, AR225: 6, AR060: 6, AR055: 6, AR161: 6, AR162: 6, AR266: 6, AR163: 6, AR228: 5, AR215: 5, AR180: 5, AR181: 5, AR182: 5, AR274: 5, AR309: 5, |
| | | | | AR233: 5, AR269: 5, AR268: 5, AR183: 5, AR214: 5, AR236: 4, AR252: 4, AR290: 4, AR261: 4, AR239: 4, AR172: 4, AR177: 4, AR257: 4, AR267: 4, AR275: 4, AR264: 4, |
| | | | | AR229: 4, AR178: 4, AR255: 4, AR175: 4, AR270: 4, AR173: 4, AR262: 4, AR288: 4, AR198: 4, AR237: 4, AR179: 3, AR185: 3, AR165: 3, AR293: 3, AR271: 3, AR291: 3, |
| | | | | AR164: 3, AR166: 3, AR223: 3, AR294: 3, AR300: 3, AR287: 3, AR299: 3, AR196: 3, AR240: 3, AR297: 3, AR188: 3, AR231: 3, AR295: 3, AR089: 3, AR286: 3, AR234: 3, |
| | | | | AR230: 3, AR061: 3, AR191: 3, AR174: 3, AR226: 3, AR221: 3, AR238: 3, AR316: 3, AR227: 3, AR218: 3, AR289: 3, AR201: 3, AR285: 2, AR296: 2, AR313: 2, AR189: 2, |
| | | | | AR096: 2, AR283: 2, AR277: 2, AR247: 2, AR200: 2, AR190: 2, AR217: 2, AR232: 2, AR207: 2, AR263: 2, AR312: 2, AR199: 2, AR168: 2, AR203: 2, AR193: 2, AR224: 2, |
| | | | | AR104: 2, AR311: 2, AR260: 2, AR039: 2, AR258: 2, AR171: 2, AR216: 2, AR033: 2, AR282: 2, AR272: 2, AR219: 2, AR222: 2, AR210: 2, AR256: 1, AR205: 1, AR204: 1, |
| | | | | AR195: 1, AR213: 1, AR192: 1, S0052: 1 |
| 114 | HNGJP69 | 604891 | 124 | AR313: 28, AR162: 20, AR161: 20, AR163: 19, AR165: 18, AR164: 17, AR166: 17, AR089: 16, AR173: 14, AR242: 14, AR096: 14, AR299: 12, AR247: 12, AR300: 11, |
| | | | | AR178: 11, AR258: 11, AR193: 11, AR175: 10, AR240: 10, AR262: 10, AR236: 10, AR196: 10, AR039: 10, AR293: 9, AR204: 9, AR257: 9, AR183: 9, AR179: 9, AR218: 9, |
| | | | | AR312: 9, AR264: 9, AR185: 9, AR053: 9, AR180: 9, AR269: 9, AR270: 9, AR199: 8, AR191: 8, AR182: 8, AR060: 8, AR192: 8, AR296: 8, AR104: 8, AR229: 8, AR316: 8, |
| | | | | AR234: 8, AR277: 7, AR176: 7, AR260: 7, AR254: 7, AR282: 7, AR294: 7, AR285: 7, AR297: 7, AR233: 7, AR226: 7, AR174: 7, AR181: 7, AR219: 6, AR274: 6, AR275: 6, |
| | | | | AR213: 6, AR238: 6, AR212: 6, AR286: 6, AR189: 6, AR243: 6, AR287: 6, AR197: 6, AR033: 6, AR195: 6, AR201: 6, AR271: 5, AR308: 5, AR291: 5, AR203: 5, AR288: 5, |
| | | | | AR263: 5, AR255: 5, AR200: 5, AR177: 5, AR268: 5, AR188: 5, AR198: 5, AR231: 5, AR309: 5, AR205: 5, AR283: 5, AR250: 5, AR171: 5, AR289: 4, AR245: 4, AR295: 4, |
| | | | | AR239: 4, AR261: 4, AR267: 4, AR290: 4, AR230: 4, AR237: 4, AR228: 4, AR252: 4, AR266: 4, AR207: 4, AR168: 3, AR210: 3, AR272: 3, AR256: 3, AR235: 3, AR055: 3, |
| | | | | AR225: 3, AR227: 3, AR190: 3, AR311: 3, AR223: 2, AR211: 2, AR246: 2, AR232: 2, AR061: 2, AR221: 2, AR253: 1, AR224: 1, S0052: 1 |
| 115 | HNGOI12 | 1041375 | 125 | AR225: 30, AR223: 24, AR221: 18, AR224: 17, AR215: 14, AR168: 12, AR214: 9, AR222: 9, AR216: 9, AR171: 8, AR217: 8, AR266: 8, AR172: 8, AR176: 7, AR269: 7, |
| | | | | AR182: 7, AR288: 7, AR180: 7, AR245: 7, AR289: 6, AR161: 6, AR162: 6, AR204: 6, AR255: 6, AR197: 6, AR270: 6, AR183: 6, AR297: 6, AR163: 6, AR178: 6, AR268: 6, |
| | | | | AR181: 6, AR282: 6, AR236: 5, AR231: 5, AR039: 5, AR293: 5, AR207: 5, AR179: 5, AR294: 5, AR201: 5, AR295: 5, AR198: 5, AR169: 5, AR240: 5, AR286: 5, AR261: 5, |
| | | | | AR229: 5, AR165: 5, AR205: 5, AR170: 4, AR285: 4, AR233: 4, AR309: 4, AR290: 4, AR257: 4, AR177: 4, AR055: 4, AR175: 4, AR246: 4, AR300: 4, AR287: 4, AR256: 4, |
| | | | | AR173: 4, AR243: 4, AR271: 4, AR267: 4, AR235: 4, AR264: 4, AR164: 4, AR263: 4, AR247: 4, AR313: 4, AR166: 4, AR277: 4, AR262: 4, AR060: 4, AR238: 4, AR260: 4, |
| | | | | AR191: 4, AR291: 4, AR316: 4, AR258: 4, AR239: 4, AR053: 4, AR296: 4, AR228: 4, AR174: 4, AR250: 4, AR199: 4, AR096: 3, AR192: 3, AR230: 3, AR237: 3, AR196: 3, |
| | | | | AR193: 3, AR234: 3, AR283: 3, AR104: 3, AR203: 3, AR190: 3, AR272: 3, AR200: 3, AR253: 3, AR189: 3, AR061: 3, AR185: 3, AR311: 3, AR275: 3, AR226: 3, AR299: 3, |
| | | | | AR089: 3, AR227: 3, AR188: 3, AR312: 3, AR232: 2, AR219: 2, AR274: 2, AR033: 2, AR195: 2, AR212: 2, AR213: 2, AR211: 2, AR218: 1, AR242: 1, AR210: 1, AR308: 1, |
| | | | | S0428: 1 |
| | HNGOI12 | 838184 | 243 | |
| | HNGOI12 | 839283 | 244 | |
| 116 | HNHOD46 | 843488 | 126 | AR039: 32, AR313: 28, AR096: 21, AR089: 19, AR299: 16, AR185: 11, AR277: 11, AR316: 11, AR300: 10, AR104: 10, AR060: 9, AR219: 8, AR218: 8, AR240: 7, AR055: 7, |
| | | | | AR161: 6, AR162: 6, AR173: 6, AR282: 6, AR163: 6, AR165: 6, AR164: 6, AR166: 6, AR183: 5, AR247: 5, AR270: 5, AR229: 5, AR176: 4, AR175: 4, AR181: 4, AR269: 4, |
| | | | | AR257: 4, AR179: 4, AR238: 4, AR283: 4, AR178: 4, AR196: 4, AR293: 4, AR309: 4, AR262: 4, AR268: 4, AR250: 4, AR182: 4, AR174: 3, AR236: 3, AR199: 3, AR177: 3, |
| | | | | AR213: 3, AR230: 3, AR234: 3, AR171: 3, AR291: 3, AR296: 3, AR233: 3, AR258: 3, AR255: 3, AR286: 3, AR180: 3, AR191: 3, AR189: 3, AR237: 3, AR297: 3, AR312: 3, |
| | | | | AR261: 3, AR294: 3, AR295: 3, AR168: 3, AR053: 3, AR263: 3, AR226: 3, AR274: 3, AR287: 2, AR225: 2, AR188: 2, AR231: 2, AR308: 2, AR203: 2, AR267: 2, AR239: 2, |
| | | | | AR285: 2, AR289: 2, AR033: 2, AR169: 2, AR275: 2, AR227: 2, AR266: 2, AR264: 2, AR290: 2, AR224: 2, AR200: 2, AR190: 2, AR243: 2, AR311: 2, AR228: 2, AR212: 2, |
| | | | | AR222: 2, AR216: 2, AR272: 1, AR172: 1, AR211: 1, AR260: 1, AR235: 1, AR061: 1, S0216: 1 |
| 117 | HNTBL27 | 545534 | 127 | AR218: 6, AR240: 5, AR282: 5, AR277: 5, AR316: 5, AR096: 4, AR219: 4, AR185: 4, AR104: 4, AR300: 3, AR299: 3, AR060: 3, AR283: 3, AR055: 3, AR313: 3, AR089: 3, |
| | | | | AR039: 3, L0794: 3, L0663: 2, S0360: 1, H0042: 1, H0253: 1, H0150: 1, H0633: 1, S0142: 1, H0538: 1, L0804: 1, L0790: 1, L0791: 1, L0666: 1, L0664: 1, L0665: 1, H0519: 1, |
| | | | | L0747: 1, L0749: 1, L0779: 1, L0777: 1, L0755: 1 and L0731: 1. |
| 118 | HNTNI01 | 1352285 | 128 | AR207: 15, AR263: 12, AR169: 11, AR311: 11, AR212: 10, AR198: 10, AR264: 10, AR235: 10, AR252: 9, AR168: 9, AR223: 9, AR224: 9, AR089: 9, AR053: 8, AR215: 8, |
| | | | | AR172: 8, AR161: 8, AR162: 8, AR214: 8, AR222: 8, AR163: 8, AR309: 8, AR165: 8, AR205: 8, AR192: 8, AR164: 8, AR170: 8, AR221: 7, AR166: 7, AR216: 7, AR242: 7, |
| | | | | AR282: 7, AR308: 7, AR195: 7, AR171: 7, AR039: 7, AR213: 7, AR261: 7, AR312: 7, AR245: 6, AR254: 6, AR295: 6, AR225: 6, AR033: 6, AR197: 6, AR288: 6, AR217: 6, |
| | | | | AR060: 5, AR196: 5, AR274: 5, AR096: 5, AR246: 5, AR271: 5, AR291: 5, AR193: 5, AR316: 5, AR286: 5, AR277: 5, AR283: 5, AR299: 5, AR178: 5, AR272: 5, AR275: 5, |
| | | | | AR236: 4, AR243: 4, AR285: 4, AR240: 4, AR104: 4, AR313: 4, AR185: 4, AR176: 4, AR296: 4, AR297: 4, AR204: 4, AR287: 4, AR210: 4, AR055: 4, AR177: 4, AR253: 4, |
| | | | | AR183: 4, AR181: 4, AR290: 4, AR247: 4, AR269: 4, AR258: 4, AR289: 4, AR257: 4, AR201: 4, AR174: 3, AR238: 3, AR200: 3, AR262: 3, AR300: 3, AR175: 3, AR199: 3, |
| | | | | AR294: 3, AR255: 3, AR188: 3, AR268: 3, AR180: 3, AR293: 3, AR211: 3, AR173: 3, AR266: 3, AR250: 3, AR270: 3, AR061: 3, AR189: 3, AR179: 3, AR267: 3, AR239: 3, |
| | | | | AR182: 3, AR190: 3, AR227: 2, AR231: 2, AR234: 2, AR256: 2, AR219: 2, AR237: 2, AR203: 2, AR191: 2, AR229: 2, AR226: 2, AR230: 2, AR232: 2, AR260: 2, AR233: 2, |
| | | | | AR218: 2, AR228: 1, L0747: 5, H0545: 3, H0520: 3, L0439: 3, L0803: 2, L0790: 2, H0547: 2, L0740: 2, L0751: 2, L0779: 2, L0759: 2, L0593: 2, |
| | | | | H0170: 1, S0005: 1, H0485: 1, |
| | | | | H0013: 1, L0564: 1, L0770: 1, L0794: 1, L0809: 1, H0519: 1, S0378: 1, L0756: 1, L0777: 1 and H0667: 1. |
| | HNTNI01 | 699848 | 245 | |
| 119 | HOAAC90 | 1301202 | 129 | AR277: 17, AR309: 6, AR282: 5, AR055: 5, AR060: 5, AR264: 5, AR263: 5, AR176: 5, AR221: 5, AR089: 4, AR311: 4, AR295: 4, AR246: 4, AR286: 4, AR239: 3, AR287: 3, |
| | | | | AR104: 3, AR193: 3, AR272: 3, AR225: 3, AR253: 3, AR053: 3, AR096: 3, AR312: 3, AR223: 3, AR299: 3, AR171: 3, AR180: 3, AR213: 3, AR268: 3, AR316: 3, AR283: 3, |
| | | | | AR313: 3, AR192: 2, AR218: 2, AR185: 2, AR039: 2, AR300: 2, AR182: 2, AR240: 2, AR308: 2, AR257: 2, AR214: 2, AR275: 2, AR296: 2, AR173: 2, AR217: 2, AR168: 2, |
| | | | | AR237: 1, AR266: 1, AR201: 1, H0252: 1 and L4501: 1. |
| | HOAAC90 | 518979 | 246 | |
| 120 | HOCNF19 | 835049 | 130 | AR243: 5, AR213: 4, AR217: 4, AR096: 4, AR253: 3, AR204: 3, AR308: 3, AR205: 3, AR272: 3, AR197: 3, AR039: 3, AR312: 3, AR195: 3, AR053: 3, AR162: 3, AR282: 3, |
| | | | | AR215: 2, AR218: 2, AR238: 2, AR171: 2, AR311: 2, AR201: 2, AR269: 2, AR165: 2, AR185: 2, AR207: 2, AR277: 2, AR275: 2, AR274: 2, AR313: 2, AR316: 2, AR161: 2, |
| | | | | AR183: 2, AR168: 2, AR196: 2, AR289: 2, AR164: 2, AR266: 2, AR229: 2, AR172: 2, AR231: 2, AR055: 2, AR247: 2, AR104: 2, AR089: 2, AR237: 2, AR061: 1, AR163: 1, |
| | | | | AR285: 1, AR222: 1, AR228: 1, AR300: 1, AR262: 1, AR264: 1, AR283: 1, AR191: 1, AR270: 1, AR178: 1, AR299: 1, AR293: 1, AR239: 1, AR296: 1, AR193: 1, AR060: 1, |
| | | | | AR257: 1, AR225: 1, AR258: 1, AR246: 1, AR180: 1, AR268: 1, S0442: 2 |
| 121 | HODDW40 | 579256 | 131 | AR171: 9, AR223: 8, AR172: 7, AR168: 7, AR235: 7, AR313: 6, AR214: 6, AR161: 6, AR162: 6, AR264: 6, AR163: 6, AR309: 6, AR291: 6, AR270: 6, AR060: 6, AR165: 5, |
| | | | | AR311: 5, AR164: 5, AR039: 5, AR245: 5, AR055: 5, AR096: 5, AR263: 5, AR166: 5, AR296: 5, AR089: 5, AR271: 5, AR308: 5, AR053: 5, AR178: 4, AR275: 4, AR312: 4, |
| | | | | AR180: 4, AR176: 4, AR213: 4, AR197: 4, AR274: 4, AR299: 4, AR269: 4, AR175: 4, AR297: 4, AR295: 4, AR182: 4, AR285: 4, AR225: 4, AR282: 4, AR170: 4, AR250: 4, |
| | | | | AR217: 4, AR316: 3, AR268: 3, AR173: 3, AR238: 3, AR272: 3, AR224: 3, AR286: 3, AR246: 3, AR266: 3, AR183: 3, AR293: 3, AR290: 3, AR215: 3, AR288: 3, AR277: 3, |
| | | | | AR193: 3, AR185: 3, AR236: 3, AR239: 3, AR240: 3, AR231: 3, AR229: 3, AR300: 3, AR287: 3, AR216: 3, AR289: 3, AR226: 3, AR294: 3, AR201: 2, AR267: 2, AR232: 2, |
| | | | | AR283: 2, AR205: 2, AR219: 2, AR104: 2, AR207: 2, AR181: 2, AR195: 2, AR228: 2, AR237: 2, AR230: 2, AR210: 2, AR260: 2, AR255: 2, AR212: 2, AR256: 2, AR218: 1, |
| | | | | AR179: 1, AR033: 1, AR227: 1, AR211: 1, AR252: 1, AR233: 1, AR203: 1, AR196: 1, AR234: 1, H0040: 3, H0739: 1, H0645: 1, H0328: 1, H0519: 1 and H0436: 1. |
| 122 | HODFN71 | 1194866 | 132 | AR282: 12, AR176: 8, AR162: 6, AR163: 5, AR170: 5, AR161: 5, AR266: 5, AR182: 5, AR181: 5, AR055: 5, AR228: 4, AR060: 4, AR204: 4, AR269: 4, AR239: 4, AR264: 4, |
| | | | | AR233: 4, AR268: 4, AR229: 4, AR236: 4, AR177: 4, AR309: 4, AR267: 4, AR257: 3, AR197: 3, AR225: 3, AR224: 3, AR253: 3, AR222: 3, AR201: 3, AR165: 3, AR242: 3, |
| | | | | AR289: 3, AR193: 3, AR183: 3, AR270: 3, AR274: 3, AR237: 3, AR179: 3, AR217: 3, AR196: 3, AR272: 3, AR166: 3, AR207: 3, AR164: 3, AR235: 3, AR185: 3, AR300: 3, |
| | | | | AR180: 3, AR293: 3, AR290: 3, AR286: 3, AR311: 3, AR255: 3, AR238: 3, AR171: 3, AR299: 3, AR089: 3, AR247: 3, AR188: 3, AR261: 3, AR287: 3, AR234: 3, AR291: 3, |
| | | | | AR200: 3, AR175: 2, AR061: 2, AR294: 2, AR295: 2, AR203: 2, AR283: 2, AR316: 2, AR262: 2, AR214: 2, AR191: 2, AR190: 2, AR271: 2, AR297: 2, AR178: 2, AR231: 2, |
| | | | | AR227: 2, AR104: 2, AR288: 2, AR277: 2, AR285: 2, AR243: 2, AR226: 2, AR039: 2, AR096: 2, AR296: 2, AR232: 2, AR312: 2, AR173: 2, AR260: 2, AR053: 2, AR168: 2, |
| | | | | AR313: 2, AR230: 2, AR210: 1, AR258: 1, AR213: 1, AR174: 1, AR215: 1, AR218: 1, AR033: 1, AR240: 1, AR256: 1, AR308: 1, AR189: 1, |
| | | | | AR252: 1, AR211: 1, H0615: 2 and |
| | | | | H0624: 1. |
| | HODFN71 | 834999 | 247 | |
| 123 | HOEBZ89 | 828177 | 133 | AR313: 16, AR039: 13, AR089: 10, AR096: 9, AR299: 9, AR166: 8, AR229: 7, AR312: 7, AR161: 7, AR165: 7, AR300: 7, AR104: 7, |
| | | | | AR162: 6, AR238: 6, AR164: 6, AR163: 6, |
| | | | | AR252: 6, AR060: 6, AR316: 5, AR226: 5, AR257: 5, AR242: 5, AR225: 5, AR204: 5, AR192: 5, AR185: 5, AR277: 5, AR247: 5, AR293: 5, AR198: 4, AR286: 4, AR269: 4, |
| | | | | AR055: 4, AR264: 4, AR205: 4, AR237: 4, AR240: 4, AR219: 4, AR266: 4, AR212: 4, AR176: 4, AR294: 4, AR296: 4, AR213: 4, AR207: 4, AR297: 4, AR218: 4, AR262: 4, |
| | | | | AR234: 4, AR308: 3, AR243: 3, AR233: 3, AR268: 3, AR263: 3, AR230: 3, AR288: 3, AR191: 3, AR261: 3, AR239: 3, AR181: 3, AR274: 3, AR270: 3, AR267: 3, AR177: 3, |
| | | | | AR282: 3, AR309: 3, AR170: 3, AR275: 3, AR285: 3, AR174: 3, AR183: 3, AR180: 3, AR178: 3, AR196: 2, AR227: 2, AR228: 2, AR311: 2, AR283: 2, AR203: 2, AR295: 2, |
| | | | | AR053: 2, AR231: 2, AR258: 2, AR182: 2, AR255: 2, AR232: 2, AR172: 2, AR173: 2, AR199: 2, AR250: 2, AR271: 2, AR189: 2, AR179: 2, AR246: 2, AR236: 2, AR195: 2, |
| | | | | AR169: 2, AR272: 2, AR200: 2, AR290: 2, AR175: 2, AR193: 2, AR061: 2, AR188: 2, AR289: 2, AR224: 2, AR235: 2, AR216: 2, AR215: 2, AR197: 2, AR223: 1, AR190: 1, |
| | | | | AR287: 1, AR291: 1, AR217: 1, AR260: 1, AR222: 1, AR033: 1, L0749: 11, L0748: 8, S0360: 3, S0408: 3, L0646: 3, L0764: 3, S0354: 2, |
| | | | | L0777: 2, H0556: 1, S0358: 1, S0444: 1, |
| | | | | H0580: 1, H0486: 1, L0022: 1, H0687: 1, H0561: 1, L0800: 1, L0643: 1, L0654: 1, L0807: 1, L0789: 1, L0663: 1, T0068: 1, S0126: 1, H0521: 1, H0522: 1, L0750: 1, L0779: 1, |
| | | | | H0542: 1 and H0506: 1. |
| 124 | HOEDB32 | 634994 | 134 | L0807: 6, L0747: 5, S0126: 4, L0779: 4, L0771: 3, H0696: 3, L0740: 3, L0750: 3, S0358: 2, S0222: 2, L0471: 2, L0772: 2, L0662: 2, L0774: 2, L0809: 2, H0690: 2, H0670: 2, |
| | | | | S0378: 2, L0439: 2, L0755: 2, L0757: 2, L0362: 2, T0049: 1, S0180: 1, S0212: 1, H0662: 1, S0442: 1, S0360: 1, H0722: 1, H0208: 1, H0486: 1, T0039: 1, T0040: 1, L2637: 1, |
| | | | | L0021: 1, H0327: 1, H0546: 1, H0545: 1, H0123: 1, H0012: 1, H0620: 1, H0024: 1, H0687: 1, H0615: 1, H0551: 1, H0413: 1, T0042: 1, |
| | | | | L0065: 1, S0150: 1, L0637: 1, L0646: 1, |
| | | | | L0363: 1, L0649: 1, L0775: 1, L0806: 1, L0652: 1, L0661: 1, L0657: 1, L0647: 1, L0793: 1, L0663: 1, L0664: 1, L0708: 1, L2651: 1, H0144: 1, S0374: 1, S0148: 1, H0547: 1, |
| | | | | H0519: 1, H0539: 1, S0152: 1, S0406: 1, S0028: 1, L0745: 1, L0756: 1, L0780: 1, L0759: 1, S0434: 1, S0436: 1, L0361: 1, S0194: 1 and H0352: 1. |
| 125 | HOEDH84 | 748236 | 135 | AR170: 4, AR221: 3, AR266: 3, AR033: 3, AR296: 3, AR176: 3, AR311: 2, AR183: 2, AR180: 2, AR286: 2, AR233: 2, AR204: 2, AR232: 2, AR257: 1, AR216: 1, AR291: 1, |
| | | | | AR300: 1, AR255: 1, AR172: 1, AR283: 1, AR299: 1, AR225: 1, AR270: 1, S0126: 3, L0731: 2, S0040: 1, S0356: 1, H0370: 1, H0031: 1 and H0633: 1. |
| 126 | HOFNC14 | 1352378 | 136 | AR263: 5, AR171: 4, AR213: 4, AR282: 4, AR205: 3, AR169: 3, AR235: 3, AR246: 3, AR162: 2, AR161: 2, AR180: 2, AR221: 2, AR178: 2, AR176: 2, AR245: 2, AR287: 2, |
| | | | | AR183: 2, AR163: 2, AR311: 2, AR089: 1, AR309: 1, AR264: 1, AR104: 1, AR033: 1, AR191: 1, AR230: 1, H0415: 1 |
| | HOFNC14 | 899292 | 248 | |
| 127 | HOFND85 | 847424 | 137 | AR165: 3, AR162: 3, AR170: 3, AR241: 3, AR221: 2, AR171: 2, AR169: 2, AR269: 2, AR201: 2, AR195: 2, AR164: 2, AR166: 2, AR272: 2, AR212: 2, AR180: 2, AR210: 2, |
| | | | | AR193: 2, AR204: 2, AR236: 2, AR294: 2, AR246: 2, AR243: 2, AR199: 1, AR284: 1, AR203: 1, AR282: 1, AR310: 1, AR273: 1, AR161: 1, AR096: 1, AR163: 1, AR089: 1, |
| | | | | AR183: 1, AR283: 1, AR288: 1 |
| 128 | HOFOC33 | 1186156 | 138 | AR214: 243, AR223: 206, AR222: 175, AR217: 161, AR272: 140, AR216: 132, AR224: 119, AR225: 118, AR172: 112, AR274: 111, AR173: 108, AR247: 105, AR169: 105, |
| | | | | AR168: 100, AR171: 99, AR308: 98, AR215: 97, AR311: 94, AR170: 91, AR312: 88, AR309: 86, AR183: 86, AR270: 83, AR267: 76, AR264: 70, AR221: 68, AR176: 65, |
| | | | | AR166: 61, AR212: 59, AR245: 58, AR161: 58, AR263: 56, AR213: 55, AR162: 52, AR165: 52, AR275: 52, AR271: 51, AR205: 51, AR164: 50, AR174: 49, AR268: 49, |
| | | | | AR266: 48, AR053: 48, AR061: 47, AR163: 46, AR260: 45, AR269: 43, AR296: 43, AR177: 41, AR254: 40, AR179: 38, AR313: 37, AR293: 37, AR240: 36, AR104: 35, |
| | | | | AR231: 32, AR185: 32, AR297: 32, AR234: 29, AR238: 29, AR181: 28, AR300: 28, AR258: 27, AR285: 26, AR289: 26, AR243: 25, AR316: 25, AR255: 24, AR290: 24, |
| | | | | AR239: 24, AR246: 24, AR291: 23, AR277: 23, AR210: 23, AR294: 22, AR211: 22, AR261: 21, AR262: 21, AR282: 21, AR235: 21, AR178: 21, AR287: 20, AR201: 20, |
| | | | | AR295: 20, AR197: 19, AR189: 19, AR230: 19, AR199: 18, AR226: 18, AR175: 18, AR198: 18, AR242: 18, AR233: 17, AR299: 17, AR283: 17, AR236: 17, AR096: 17, |
| | | | | AR232: 17, AR288: 16, AR227: 16, AR253: 16, AR039: 16, AR250: 15, AR207: 15, AR204: 15, AR192: 15, AR190: 15, AR229: 14, AR089: 13, AR180: 13, AR195: 13, |
| | | | | AR286: 13, AR257: 12, AR188: 12, AR237: 12, AR203: 11, AR219: 11, AR200: 11, AR055: 11, AR193: 11, AR182: 10, AR228: 9, AR196: 9, AR256: 9, AR218: 9, AR191: 8, |
| | | | | AR033: 7, AR060: 6, AR252: 4, H0415: 3, and H0414: 2. |
| | HOFOC33 | 967554 | 249 | |
| | HOFOC33 | 878690 | 250 | |
| | HOFOC33 | 905734 | 251 | |
| | HOFOC33 | 902326 | 252 | |
| | HOFOC33 | 885140 | 253 | |
| | HOFOC33 | 806819 | 254 | |
| 129 | HOGCK20 | 745445 | 139 | AR055: 8, AR238: 7, AR239: 6, AR273: 5, AR183: 5, AR218: 5, AR219: 5, AR096: 5, AR184: 5, AR269: 5, AR226: 4, AR265: 4, AR227: 4, AR270: 4, AR314: 4, AR298: 4, |
| | | | | AR291: 4, AR249: 4, AR268: 4, AR161: 4, AR162: 4, AR215: 3, AR232: 3, AR225: 3, AR165: 3, AR166: 3, AR237: 3, AR231: 3, AR163: 3, AR164: 3, AR182: 3, AR170: 3, |
| | | | | AR061: 3, AR292: 3, AR274: 3, AR284: 3, AR296: 3, AR308: 3, AR316: 3, AR244: 3, AR224: 3, AR290: 3, AR309: 3, AR221: 3, AR052: 3, AR267: 3, AR289: 3, AR234: 3, |
| | | | | AR222: 3, AR104: 3, AR315: 3, AR247: 3, AR282: 3, AR275: 3, AR266: 3, AR313: 3, AR285: 2, AR180: 2, AR240: 2, AR175: 2, AR312: 2, AR245: 2, AR295: 2, AR230: 2, |
| | | | | AR299: 2, AR060: 2, AR229: 2, AR286: 2, AR033: 2, AR171: 2, AR280: 2, AR263: 2, AR186: 2, AR297: 2, AR287: 2, AR262: 2, AR243: 2, AR293: 2, AR214: 2, AR216: 2, |
| | | | | AR288: 2, AR199: 2, AR223: 2, AR228: 2, AR172: 2, AR177: 2, AR300: 2, AR174: 2, AR217: 2, AR254: 2, AR039: 2, AR203: 2, AR089: 2, AR294: 2, AR233: 2, AR272: 2, |
| | | | | AR260: 2, AR192: 2, AR198: 2, AR185: 2, AR311: 2, AR256: 2, AR212: 2, AR246: 2, AR283: 2, AR257: 2, AR213: 2, AR277: 2, AR210: 1, AR053: 1, AR261: 1, AR264: 1, |
| | | | | AR258: 1, AR190: 1, AR196: 1, AR259: 1, AR255: 1, AR235: 1, AR178: 1, AR195: 1, H0046: 10, L0665: 10, S0418: 8, H0556: 5, S0436: 5, L0666: 4, L0565: 4, H0521: 4, |
| | | | | S0408: 3, H0575: 3, H0052: 3, H0124: 3, L0774: 3, L0776: 3, L0655: 3, L0659: 3, H0519: 3, S0126: 3, H0435: 3, L0748: 3, L0731: 3, H0295: 2, S0420: 2, H0619: 2, L3388: 2, |
| | | | | S0278: 2, H0586: 2, H0599: 2, S0010: 2, H0050: 2, H0083: 2, H0553: 2, H0551: 2, S0440: 2, L3905: 2, L0771: 2, L0662: 2, L0768: 2, L0794: 2, L0651: 2, L0378: 2, L0805: 2, |
| | | | | L0809: 2, L2261: 2, H0436: 2, L0751: 2, L0747: 2, L0779: 2, L0777: 2, L0752: 2, L0757: 2, L0758: 2, L0596: 2, H0542: 2, H0686: 1, H0294: 1, H0657: 1, H0656: 1, H0341: 1, |
| | | | | S0282: 1, H0484: 1, H0663: 1, H0638: 1, S0356: 1, S0442: 1, S0358: 1, S0376: 1, L3705: 1, H0580: 1, H0729: 1, H0393: 1, H0261: 1, H0549: 1, H0370: 1, H0392: 1, T0114: 1, |
| | | | | H0013: 1, H0156: 1, L0021: 1, H0194: 1, H0251: 1, H0085: 1, H0546: 1, H0570: 1, H0123: 1, L0471: 1, H0024: 1, H0014: 1, L0163: 1, |
| | | | | H0201: 1, H0594: 1, H0687: 1, S0022: 1, |
| | | | | H0252: 1, H0328: 1, H0615: 1, H0039: 1, H0030: 1, H0628: 1, S0366: 1, H0598: 1, H0135: 1, H0616: 1, H0087: 1, H0264: 1, H0059: 1, |
| | | | | T0041: 1, T0042: 1, H0561: 1, S0150: 1, |
| | | | | L0647: 1, S0144: 1, S0422: 1, S0426: 1, L0369: 1, L0625: 1, L0763: 1, L0770: 1, L0769: 1, L3904: 1, L0667: 1, L0372: 1, L0646: 1, L0800: 1, L0374: 1, L0764: 1, L0363: 1, |
| | | | | L0766: 1, L0649: 1, L0381: 1, L0375: 1, L0657: 1, L0493: 1, L0365: 1, L0636: 1, L0663: 1, L0664: 1, L4560: 1, L3871: 1, L2257: 1, L2263: 1, L2260: 1, L2262: 1, H0144: 1, |
| | | | | L0438: 1, L2702: 1, H0547: 1, H0689: 1, H0690: 1, H0658: 1, H0670: 1, H0660: 1, S0380: 1, S0152: 1, S0188: 1, S0027: 1, L0742: 1, L0744: 1, S0434: 1, L0581: 1, L0608: 1, |
| | | | | H0665: 1, S0192: 1, S0242: 1, H0543: 1, S0460: 1 and L3561: 1. |
| | HOGCK20 | 664499 | 255 | |
| 130 | HOGCS52 | 919898 | 140 | AR214: 124, AR216: 116, AR217: 83, AR223: 82, AR174: 78, AR222: 78, AR169: 74, AR171: 73, AR205: 72, AR215: 71, AR224: 71, AR225: 70, AR274: 69, AR168: 69, |
| | | | | AR245: 67, AR272: 67, AR210: 67, AR247: 66, AR212: 66, AR179: 65, AR199: 60, AR172: 60, AR170: 59, AR221: 59, AR218: 59, AR213: 58, AR313: 58, AR189: 57, |
| | | | | AR246: 57, AR188: 55, AR165: 54, AR096: 52, AR236: 52, AR164: 51, AR219: 50, AR039: 49, AR312: 49, AR089: 49, AR173: 49, AR291: 48, AR166: 48, AR190: 47, |
| | | | | AR271: 46, AR183: 44, AR240: 43, AR053: 43, AR316: 42, AR211: 41, AR311: 41, AR296: 41, AR252: 41, AR185: 41, AR175: 40, AR290: 40, AR300: 40, AR163: 40, |
| | | | | AR161: 39, AR162: 39, AR299: 39, AR308: 39, AR177: 38, AR178: 38, AR191: 38, AR269: 38, AR295: 38, AR181: 37, AR282: 36, AR288: 36, AR268: 36, AR254: 35, |
| | | | | AR266: 35, AR231: 34, AR283: 34, AR197: 34, AR267: 34, AR060: 33, AR180: 33, AR289: 33, AR195: 33, AR275: 32, AR293: 31, AR182: 31, AR200: 31, AR262: 31, |
| | | | | AR270: 31, AR237: 30, AR203: 30, AR285: 29, AR256: 29, AR297: 29, AR250: 29, AR309: 29, AR263: 29, AR287: 29, AR242: 28, AR192: 28, AR201: 28, AR176: 28, |
| | | | | AR230: 28, AR255: 28, AR232: 27, AR204: 27, AR234: 27, AR261: 26, AR294: 26, AR196: 26, AR253: 26, AR198: 25, AR233: 24, AR257: 24, AR243: 24, AR229: 24, |
| | | | | AR239: 23, AR207: 23, AR264: 23, AR277: 23, AR258: 22, AR238: 22, AR193: 22, AR227: 21, AR061: 20, AR286: 19, AR235: 19, AR055: 19, AR260: 19, AR104: 18, |
| | | | | AR226: 18, AR033: 17, AR228: 17, L0751: 8, L0754: 8, L0769: 6, L0803: 6, L0748: 6, H0100: 5, H0435: 5, L0439: 5, L0758: 5, L0665: 4, L0747: 4, L0749: 4, S0114: 3, |
| | | | | H0619: 3, H0546: 3, H0457: 3, S0002: 3, L0637: 3, L0657: 3, H0658: 3, L0743: 3, L0777: 3, L0780: 3, H0445: 3, S0040: 2, H0255: 2, H0645: 2, S0278: 2, H0024: 2, H0416: 2, |
| | | | | H0030: 2, H0553: 2, H0135: 2, H0649: 2, L0770: 2, L0804: 2, L0774: 2, L0805: 2, L0659: 2, H0659: 2, H0518: 2, H0555: 2, L0755: 2, L0757: 2, L0599: 2, L0603: 2, H0423: 2, |
| | | | | H0265: 1, H0556: 1, L0460: 1, H0295: 1, S0218: 1, H0583: 1, H0650: 1, S0212: 1, H0483: 1, H0402: 1, H0125: 1, S0418: 1, S0420: 1, S0356: 1, S0360: 1, S0046: 1, L0717: 1, |
| | | | | H0261: 1, H0370: 1, H0391: 1, H0438: 1, H0486: 1, T0039: 1, H0250: 1, H0156: 1, L0021: 1, H0575: 1, T0082: 1, H0253: 1, S0474: 1, |
| | | | | T0071: 1, H0581: 1, S0049: 1, H0052: 1, |
| | | | | H0235: 1, H0150: 1, L0471: 1, H0620: 1, S0362: 1, S0388: 1, T0010: 1, H0594: 1, H0266: 1, H0188: 1, H0687: 1, H0292: 1, H0615: 1, |
| | | | | H0688: 1, H0048: 1, H0424: 1, H0031: 1, |
| | | | | H0644: 1, L0143: 1, H0181: 1, H0617: 1, L0455: 1, H0708: 1, H0163: 1, H0591: 1, H0551: 1, H0488: 1, H0646: 1, S0344: 1, L0762: 1, |
| | | | | L0640: 1, L0638: 1, L0761: 1, L0772: 1, |
| | | | | L0374: 1, L0764: 1, L0771: 1, L0648: 1, L0521: 1, L0662: 1, L0768: 1, L0794: 1, L0649: 1, L0386: 1, L0381: 1, L0775: 1, L0375: 1, L0378: 1, L0806: 1, L0653: 1, L0776: 1, |
| | | | | L0655: 1, L0606: 1, L0518: 1, L0809: 1, L0789: 1, L0793: 1, L0666: 1, L0664: 1, S0052: 1, S0374: 1, H0779: 1, L0438: 1, H0547: 1, H0593: 1, H0690: 1, H0682: 1, H0670: 1, |
| | | | | H0660: 1, H0666: 1, S0330: 1, S0152: 1, H0696: 1, H0436: 1, L0745: 1, L0750: 1, L0779: 1, S0260: 1, S0434: 1, L0605: 1, L0595: 1, L0361: 1, H0653: 1, S0192: 1, S0194: 1, |
| | | | | S0276: 1, H0422: 1, H0008: 1 and H0352: 1. |
| | HOGCS52 | 907118 | 256 | |
| | HOGCS52 | 867965 | 257 | |
| 131 | HOUCQ17 | 429229 | 141 | AR183: 38, AR269: 28, AR173: 21, AR270: 19, AR268: 19, AR290: 17, AR190: 17, AR175: 16, AR182: 16, AR267: 14, AR172: 12, AR274: 11, AR179: 11, AR181: 10, |
| | | | | AR165: 10, AR296: 9, AR164: 9, AR166: 9, AR189: 9, AR271: 8, AR197: 8, AR161: 8, AR285: 8, AR184: 8, AR284: 8, AR162: 8, AR298: 8, AR292: 8, AR163: 7, AR174: 7, |
| | | | | AR291: 7, AR178: 7, AR192: 7, AR198: 6, AR241: 6, AR240: 6, AR171: 6, AR177: 6, AR255: 6, AR293: 6, AR207: 6, AR245: 6, AR089: 6, AR176: 6, AR188: 5, AR180: 5, |
| | | | | AR246: 5, AR170: 5, AR235: 5, AR195: 5, AR288: 5, AR191: 5, AR201: 5, AR237: 5, AR210: 5, AR185: 5, AR266: 5, AR289: 5, AR193: 4, AR168: 4, AR262: 4, AR294: 4, |
| | | | | AR287: 4, AR211: 4, AR311: 4, AR295: 4, AR257: 4, AR264: 4, AR060: 4, AR243: 4, AR272: 4, AR297: 4, AR039: 4, AR169: 4, AR286: 4, AR196: 4, AR247: 4, AR205: 4, |
| | | | | AR238: 4, AR261: 4, AR033: 3, AR312: 3, AR282: 3, AR204: 3, AR252: 3, AR186: 3, AR273: 3, AR308: 3, AR231: 3, AR226: 3, AR316: 3, AR256: 3, AR299: 3, AR215: 3, |
| | | | | AR217: 3, AR234: 3, AR300: 3, AR053: 3, AR230: 3, AR233: 3, AR263: 3, AR229: 3, AR052: 3, AR212: 3, AR244: 3, AR061: 3, AR248: 3, AR228: 3, AR275: 3, AR313: 3, |
| | | | | AR199: 3, AR236: 3, AR225: 3, AR309: 2, AR258: 2, AR055: 2, AR260: 2, AR251: 2, AR206: 2, AR104: 2, AR259: 2, AR242: 2, AR096: 2, AR277: 2, AR200: 2, AR249: 2, |
| | | | | AR213: 2, AR221: 2, AR227: 2, AR203: 2, AR216: 2, AR222: 2, AR232: 2, AR239: 2, AR214: 2, AR224: 2, AR283: 2, AR223: 2, AR250: 1, AR253: 1, AR218: 1, AR310: 1, |
| | | | | L0731: 19, S0414: 18, L0665: 18, L0747: 10, L0749: 9, H0411: 7, H0431: 7, L0662: 7, L0750: 6, H0031: 5, L0748: 5, L0439: 5, S0194: 4, |
| | | | | H0717: 3, H0014: 3, L0666: 3, L0663: 3, |
| | | | | S0126: 3, H0690: 3, L0740: 3, L0752: 3, L0599: 3, L0361: 3, H0713: 2, S0212: 2, H0427: 2, S0280: 2, H0544: 2, S0003: 2, H0644: 2, L0598: 2, L0649: 2, L0803: 2, L0657: 2, |
| | | | | L0659: 2, L0809: 2, L3872: 2, L0789: 2, L0438: 2, S0406: 2, H0478: 2, L0744: 2, L0754: 2, L0756: 2, L0779: 2, L0757: 2, L0758: 2, H0667: 2, S0276: 2, H0739: 1, H0624: 1, |
| | | | | H0170: 1, H0171: 1, S0040: 1, H0295: 1, L3403: 1, S0354: 1, S0358: 1, S0444: 1, S0360: 1, S0408: 1, L1441: 1, H0730: 1, H0734: 1, S6022: 1, H0587: 1, H0486: 1, T0039: 1, |
| | | | | L3506: 1, L3530: 1, H0599: 1, H0036: 1, S0010: 1, H0545: 1, L0471: 1, L0163: 1, H0687: 1, S0250: 1, L0483: 1, H0030: 1, H0553: 1, L0142: 1, H0617: 1, H0616: 1, T0067: 1, |
| | | | | H0380: 1, H0100: 1, H0494: 1, S0210: 1, UNKWN: 1, L0769: 1, L3904: 1, L5565: 1, L0643: 1, L0767: 1, L0774: 1, L0775: 1, L0375: 1, |
| | | | | L0784: 1, L0776: 1, L0656: 1, L4669: 1, |
| | | | | L0783: 1, L0384: 1, L5622: 1, L2259: 1, H0693: 1, H0724: 1, H0520: 1, H0670: 1, H0648: 1, H0672: 1, S0044: 1, L0777: 1, L0755: 1, L0759: 1, S0031: 1, S0260: 1, S0192: 1, |
| | | | | S0242: 1 and S0196: 1. |
| 132 | HOUDK26 | 565393 | 142 | AR313: 6, AR172: 6, AR248: 6, AR171: 6, AR222: 5, AR214: 5, AR060: 5, AR216: 5, AR161: 5, AR163: 5, AR162: 5, AR055: 5, AR186: 4, AR221: 4, AR176: 4, AR224: 4, |
| | | | | AR089: 4, AR309: 4, AR165: 4, AR181: 4, AR164: 4, AR166: 4, AR183: 4, AR235: 4, AR269: 4, AR215: 4, AR299: 4, AR052: 4, AR217: 3, AR180: 3, AR264: 3, AR178: 3, |
| | | | | AR177: 3, AR191: 3, AR251: 3, AR236: 3, AR218: 3, AR228: 3, AR240: 3, AR096: 3, AR247: 3, AR282: 3, AR223: 3, AR104: 3, AR212: 3, AR310: 3, AR201: 3, AR316: 3, |
| | | | | AR267: 3, AR168: 3, AR261: 3, AR312: 3, AR293: 3, AR196: 3, AR193: 3, AR255: 3, AR170: 3, AR295: 3, AR300: 3, AR277: 3, AR266: 3, AR268: 3, AR219: 3, AR174: 3, |
| | | | | AR185: 3, AR197: 3, AR270: 3, AR213: 3, AR190: 3, AR061: 2, AR292: 2, AR173: 2, AR179: 2, AR175: 2, AR053: 2, AR238: 2, AR184: 2, AR311: 2, AR182: 2, AR239: 2, |
| | | | | AR291: 2, AR225: 2, AR257: 2, AR297: 2, AR308: 2, AR283: 2, AR188: 2, AR039: 2, AR253: 2, AR275: 2, AR289: 2, AR233: 2, AR288: 2, AR294: 2, AR287: 2, AR242: 2, |
| | | | | AR229: 2, AR033: 2, AR262: 2, AR169: 2, AR259: 2, AR189: 2, AR260: 2, AR258: 2, AR230: 2, AR272: 2, AR203: 2, AR200: 2, AR195: 2, AR234: 2, AR237: 1, AR281: 1, |
| | | | | AR199: 1, AR205: 1, AR231: 1, AR274: 1, AR290: 1, AR252: 1, AR296: 1, AR226: 1, AR286: 1, AR271: 1, AR256: 1, AR285: 1, AR194: 1, AR227: 1, AR210: 1, S0040: 1, |
| | | | | H0696: 1, L0742: 1, S0031: 1 and S0434: 1. |
| 133 | HOVCA92 | 527644 | 143 | AR274: 3, AR246: 3, AR309: 3, AR243: 3, AR217: 3, AR039: 2, AR172: 2, AR223: 2, AR161: 2, AR178: 2, AR270: 2, AR299: 1, AR166: 1, AR182: 1, AR162: 1, AR282: 1, |
| | | | | AR269: 1, AR089: 1, AR201: 1, AR266: 1, AR170: 1, AR171: 1, AR257: 1, AR261: 1, S0114: 1, H0402: 1, H0305: 1, H0428: 1, H0264: 1 and S0052: 1. |
| 134 | HPJBK12 | 1011467 | 144 | AR215: 5, AR197: 4, AR039: 4, AR309: 4, AR245: 4, AR161: 3, AR162: 3, AR163: 3, AR204: 3, AR165: 3, AR225: 3, AR169: 3, AR264: 3, AR282: 3, AR272: 3, AR089: 3, |
| | | | | AR180: 3, AR213: 3, AR172: 3, AR253: 2, AR166: 2, AR212: 2, AR193: 2, AR252: 2, AR271: 2, AR312: 2, AR275: 2, AR164: 2, AR060: 2, AR240: 2, AR216: 2, AR266: 2, |
| | | | | AR201: 2, AR205: 2, AR183: 2, AR176: 2, AR195: 2, AR223: 2, AR283: 2, AR277: 1, AR311: 1, AR247: 1, AR313: 1, AR242: 1, AR199: 1, AR299: 1, AR316: 1, AR188: 1, |
| | | | | AR104: 1, AR168: 1, AR185: 1, AR291: 1, AR287: 1, AR231: 1, AR294: 1, AR230: 1, AR096: 1, S0152: 2 |
| | HPJBK12 | 525375 | 258 | |
| | HPJBK12 | 796925 | 259 | |
| | HPJBK12 | 699587 | 260 | |
| 135 | HPJEX20 | 1352420 | 145 | AR221: 5, AR271: 4, AR171: 3, AR309: 3, AR176: 3, AR183: 2, AR175: 2, AR308: 2, AR245: 2, AR225: 2, AR197: 2, AR235: 2, AR200: 2, AR269: 2, AR282: 2, AR172: 2, |
| | | | | AR195: 2, AR291: 1, AR290: 1, AR312: 1, AR165: 1, AR272: 1, AR261: 1, AR264: 1, AR211: 1, AR210: 1, AR168: 1, AR169: 1, AR193: 1, |
| | | | | AR224: 1, AR205: 1, S0428: 1 and |
| | | | | S0152: 1. |
| | HPJEX20 | 1184442 | 261 | |
| | HPJEX20 | 975252 | 262 | |
| | HPJEX20 | 894744 | 263 | |
| | HPJEX20 | 898220 | 264 | |
| 136 | HPMAI22 | 635491 | 146 | AR277: 10, AR282: 8, AR170: 7, AR283: 7, AR245: 7, AR055: 7, AR192: 7, AR271: 7, AR224: 6, AR240: 6, AR253: 6, AR178: 6, AR207: 6, AR181: 6, AR197: 5, AR177: 5, |
| | | | | AR176: 5, AR204: 5, AR060: 5, AR089: 5, AR104: 5, AR309: 5, AR183: 5, AR221: 5, AR246: 5, AR180: 4, AR316: 4, AR266: 4, AR255: 4, AR268: 4, AR039: 4, AR162: 4, |
| | | | | AR198: 4, AR161: 4, AR163: 4, AR195: 4, AR175: 4, AR215: 4, AR201: 4, AR174: 4, AR218: 4, AR171: 4, AR263: 4, AR223: 4, AR193: 4, AR295: 4, AR243: 4, AR168: 4, |
| | | | | AR172: 4, AR264: 4, AR270: 4, AR185: 4, AR269: 4, AR199: 4, AR288: 3, AR242: 3, AR229: 3, AR096: 3, AR261: 3, AR299: 3, AR222: 3, AR290: 3, AR205: 3, AR179: 3, |
| | | | | AR182: 3, AR217: 3, AR164: 3, AR291: 3, AR169: 3, AR165: 3, AR267: 3, AR213: 3, AR252: 3, AR300: 3, AR228: 3, AR297: 3, AR189: 3, AR166: 3, AR313: 3, AR272: 3, |
| | | | | AR239: 3, AR311: 3, AR285: 3, AR188: 3, AR173: 3, AR233: 3, AR312: 3, AR236: 3, AR293: 3, AR296: 3, AR190: 3, AR191: 3, AR200: 3, AR219: 3, AR257: 3, AR237: 3, |
| | | | | AR286: 3, AR212: 3, AR226: 3, AR289: 3, AR214: 3, AR196: 3, AR294: 2, AR250: 2, AR033: 2, AR203: 2, AR231: 2, AR235: 2, AR262: 2, AR232: 2, AR225: 2, AR274: 2, |
| | | | | AR061: 2, AR210: 2, AR287: 2, AR216: 2, AR275: 2, AR234: 2, AR230: 2, AR227: 2, AR308: 2, AR053: 2, AR258: 2, AR247: 2, AR256: 1, AR238: 1, AR211: 1, AR260: 1, |
| | | | | L0794: 6, H0031: 4, L0779: 3, L0600: 3, L0768: 2, L0805: 2, L0755: 2, L3643: 1, H0713: 1, H0662: 1, L0767: 1, L0657: 1, L0809: 1, L0790: 1, S0052: 1, H0724: 1, H0539: 1, |
| | | | | S0406: 1, L0756: 1, S0436: 1 and L0603: 1. |
| 137 | HPRBC80 | 829136 | 147 | AR296: 40, AR291: 16, AR295: 15, AR289: 12, AR256: 12, AR235: 11, AR261: 11, AR266: 11, AR165: 11, AR277: 11, AR264: 11, AR164: 11, AR161: 11, AR162: 11, |
| | | | | AR260: 10, AR163: 10, AR297: 10, AR166: 10, AR285: 10, AR039: 9, AR257: 9, AR288: 9, AR089: 9, AR236: 9, AR263: 9, AR313: 8, AR191: 8, AR204: 8, AR238: 8, |
| | | | | AR287: 8, AR255: 8, AR286: 8, AR207: 8, AR253: 8, AR293: 8, AR309: 8, AR198: 8, AR242: 8, AR271: 7, AR096: 7, AR312: 7, AR262: 7, AR196: 7, AR316: 7, AR205: 7, |
| | | | | AR181: 7, AR192: 7, AR254: 7, AR282: 7, AR104: 7, AR311: 6, AR308: 6, AR171: 6, AR250: 6, AR053: 6, AR182: 6, AR055: 6, AR225: 6, AR294: 6, AR269: 6, AR283: 6, |
| | | | | AR240: 6, AR258: 6, AR217: 6, AR199: 6, AR270: 6, AR190: 6, AR173: 6, AR245: 5, AR272: 5, AR243: 5, AR176: 5, AR224: 5, AR175: 5, AR177: 5, AR183: 5, AR200: 5, |
| | | | | AR060: 5, AR299: 5, AR180: 5, AR268: 5, AR197: 5, AR188: 5, AR223: 5, AR170: 5, AR174: 5, AR218: 5, AR221: 5, AR212: 5, AR246: 5, AR214: 5, AR193: 4, AR300: 4, |
| | | | | AR213: 4, AR274: 4, AR195: 4, AR179: 4, AR178: 4, AR231: 4, AR275: 4, AR232: 4, AR189: 4, AR267: 4, AR185: 4, AR201: 4, AR233: 4, AR168: 4, AR172: 4, AR219: 4, |
| | | | | AR222: 4, AR216: 4, AR247: 4, AR290: 4, AR226: 4, AR211: 4, AR203: 4, AR033: 4, AR239: 4, AR234: 4, AR252: 4, AR237: 3, AR215: 3, AR229: 3, AR228: 3, AR061: 3, |
| | | | | AR230: 3, AR210: 2, AR227: 2, AR169: 2, L0805: 5, L0809: 5, L0759: 4, L0740: 3, L0758: 3, H0657: 2, S0444: 2, H0032: 2, S0422: 2, |
| | | | | L0650: 2, L0776: 2, L0789: 2, L0756: 2, |
| | | | | L0595: 2, L0601: 2, L3643: 1, H0713: 1, T0049: 1, S0134: 1, L0002: 1, S0001: 1, L0005: 1, S0442: 1, H0734: 1, H0747: 1, H0586: 1, H0013: 1, H0147: 1, H0070: 1, H0622: 1, |
| | | | | H0553: 1, L0055: 1, H0674: 1, H0090: 1, H0591: 1, H0616: 1, H0264: 1, H0272: 1, L0369: 1, L0641: 1, L0773: 1, L0662: 1, L0767: 1, L0794: 1, L0766: 1, L0649: 1, L0803: 1, |
| | | | | L0651: 1, L0655: 1, L0526: 1, L4501: 1, L0666: 1, L0664: 1, H0658: 1, H0670: 1, H0648: 1, H0710: 1, S0436: 1, L0362: 1, S0026: 1, H0136: 1, H0543: 1 and S0042: 1. |
| | HPRBC80 | 720095 | 265 | |
| 138 | HPRSB76 | 526310 | 148 | AR169: 5, AR282: 4, AR253: 4, AR266: 4, AR221: 3, AR198: 2, AR245: 2, AR295: 2, AR272: 2, AR285: 2, AR176: 2, AR225: 2, AR286: 2, AR289: 2, AR300: 2, AR214: 1, |
| | | | | AR287: 1, AR055: 1, AR182: 1, AR199: 1, AR212: 1, AR269: 1, AR170: 1, AR178: 1, AR297: 1, AR161: 1, AR293: 1, AR162: 1, H0211: 1 and L0759: 1. |
| 139 | HPWAY46 | 1001560 | 149 | AR104: 20, AR272: 17, AR185: 15, AR293: 14, AR237: 14, AR230: 13, AR296: 13, AR161: 12, AR234: 12, AR162: 12, AR283: 12, AR163: 12, AR294: 12, AR227: 11, |
| | | | | AR274: 11, AR228: 11, AR233: 10, AR297: 10, AR096: 10, AR252: 10, AR289: 9, AR061: 9, AR231: 9, AR239: 9, AR165: 9, AR308: 9, AR164: 9, AR257: 9, AR232: 9, |
| | | | | AR166: 8, AR275: 8, AR235: 8, AR313: 8, AR060: 8, AR055: 8, AR291: 8, AR169: 7, AR089: 7, AR177: 7, AR311: 7, AR263: 7, AR254: 7, AR287: 7, AR262: 7, AR178: 7, |
| | | | | AR295: 7, AR285: 7, AR229: 7, AR033: 7, AR247: 6, AR255: 6, AR309: 6, AR236: 6, AR300: 6, AR316: 6, AR261: 6, AR179: 6, AR277: 6, AR226: 6, AR299: 6, AR213: 6, |
| | | | | AR225: 6, AR176: 6, AR312: 5, AR053: 5, AR266: 5, AR290: 5, AR238: 5, AR245: 5, AR282: 5, AR286: 5, AR181: 5, AR039: 5, AR174: 5, AR212: 5, AR200: 5, AR288: 5, |
| | | | | AR204: 4, AR264: 4, AR242: 4, AR171: 4, AR240: 4, AR172: 4, AR182: 4, AR267: 4, AR195: 4, AR214: 4, AR270: 4, AR198: 4, AR246: 4, AR269: 4, AR190: 4, AR168: 3, |
| | | | | AR192: 3, AR197: 3, AR223: 3, AR268: 3, AR222: 3, AR193: 3, AR175: 3, AR170: 3, AR205: 3, AR258: 3, AR189: 3, AR224: 3, AR207: 3, AR250: 3, AR173: 3, AR217: 3, |
| | | | | AR188: 3, AR196: 3, AR180: 3, AR243: 2, AR191: 2, AR201: 2, AR203: 2, AR183: 2, AR199: 1, AR210: 1, AR260: 1, AR215: 1, AR253: 1, AR216: 1, AR221: 1, S0408: 4, |
| | | | | L0666: 4, S0360: 2, S0374: 2, S0356: 1, S0376: 1, H0730: 1, S0222: 1, H0150: 1, L0774: 1, L0634: 1, L0790: 1, L0665: 1, H0781: 1, H0689: 1, S0044: 1, S0406: 1, H0555: 1, |
| | | | | L0777: 1, L0759: 1 and S0434: 1. |
| | HPWAY46 | 876469 | 266 | |
| | HPWAY46 | 789574 | 267 | |
| 140 | HPWAZ95 | 413270 | 150 | AR296: 12, AR295: 12, AR161: 11, AR162: 11, AR163: 11, AR089: 9, AR291: 9, AR165: 9, AR164: 9, AR166: 8, AR261: 8, AR104: 8, AR313: 8, AR270: 8, AR269: 7, |
| | | | | AR235: 7, AR309: 7, AR192: 7, AR178: 7, AR180: 7, AR285: 7, AR242: 7, AR176: 7, AR271: 7, AR253: 7, AR033: 7, AR297: 6, AR182: 6, AR053: 6, AR228: 6, AR268: 6, |
| | | | | AR183: 6, AR266: 6, AR294: 6, AR255: 6, AR293: 5, AR175: 5, AR264: 5, AR181: 5, AR236: 5, AR267: 5, AR191: 5, AR060: 5, AR290: 5, AR243: 5, AR173: 5, AR287: 5, |
| | | | | AR229: 5, AR282: 5, AR257: 5, AR096: 5, AR193: 5, AR316: 5, AR289: 5, AR188: 5, AR288: 4, AR177: 4, AR299: 4, AR233: 4, AR300: 4, AR201: 4, AR246: 4, AR204: 4, |
| | | | | AR213: 4, AR231: 4, AR263: 4, AR262: 4, AR205: 4, AR275: 4, AR196: 4, AR174: 4, AR237: 4, AR179: 4, AR312: 4, AR189: 4, AR214: 4, AR245: 4, AR239: 4, AR274: 4, |
| | | | | AR311: 4, AR272: 4, AR238: 4, AR185: 4, AR247: 4, AR190: 3, AR061: 3, AR200: 3, AR226: 3, AR286: 3, AR207: 3, AR039: 3, AR195: 3, AR055: 3, AR197: 3, AR252: 3, |
| | | | | AR218: 3, AR277: 3, AR225: 3, AR254: 3, AR216: 3, AR240: 3, AR198: 3, AR260: 3, AR230: 3, AR258: 3, AR232: 3, AR308: 3, AR256: 3, AR234: 3, AR203: 3, AR199: 3, |
| | | | | AR250: 3, AR215: 3, AR283: 2, AR227: 2, AR219: 2, AR168: 2, AR221: 2, AR211: 2, AR212: 2, AR224: 2, AR170: 1, AR169: 1, AR210: 1, AR222: 1, AR172: 1, AR223: 1, |
| | | | | S0044: 1 |
| 141 | HRACD15 | 871221 | 151 | AR193: 12, AR165: 11, AR164: 11, AR166: 10, AR299: 10, AR313: 9, AR162: 9, AR161: 9, AR246: 9, AR163: 9, AR205: 9, AR312: 9, AR311: 9, AR089: 8, AR243: 8, |
| | | | | AR245: 8, AR096: 8, AR195: 8, AR242: 7, AR176: 7, AR270: 7, AR291: 7, AR212: 7, AR297: 7, AR264: 7, AR288: 7, AR199: 7, AR197: 7, AR282: 7, AR300: 6, AR240: 6, |
| | | | | AR272: 6, AR196: 6, AR285: 6, AR275: 6, AR201: 6, AR200: 6, AR263: 6, AR213: 6, AR229: 6, AR221: 6, AR225: 6, AR183: 6, AR266: 6, AR268: 5, AR293: 5, AR283: 5, |
| | | | | AR255: 5, AR104: 5, AR247: 5, AR274: 5, AR308: 5, AR180: 5, AR262: 5, AR295: 5, AR236: 5, AR316: 5, AR254: 5, AR053: 5, AR191: 5, AR215: 5, AR287: 5, AR277: 5, |
| | | | | AR203: 5, AR238: 5, AR188: 5, AR223: 5, AR039: 5, AR235: 5, AR269: 4, AR261: 4, AR189: 4, AR309: 4, AR289: 4, AR060: 4, AR258: 4, AR182: 4, AR175: 4, AR294: 4, |
| | | | | AR210: 4, AR185: 4, AR286: 4, AR174: 4, AR178: 4, AR198: 4, AR192: 4, AR257: 4, AR177: 4, AR190: 4, AR290: 4, AR173: 4, AR179: 4, AR033: 4, AR296: 3, AR214: 3, |
| | | | | AR217: 3, AR181: 3, AR267: 3, AR170: 3, AR256: 3, AR231: 3, AR224: 3, AR253: 3, AR234: 3, AR230: 3, AR239: 3, AR260: 3, AR237: 3, AR252: 3, AR250: 3, AR233: 3, |
| | | | | AR216: 3, AR204: 2, AR226: 2, AR227: 2, AR232: 2, AR061: 2, AR228: 2, AR211: 2, AR171: 2, AR222: 2, AR172: 2, AR168: 2, AR055: 2, AR207: 1, AR218: 1, H0556: 15, |
| | | | | H0265: 8, L0751: 8, H0617: 7, L0662: 7, L0766: 5, L0809: 5, H0040: 4, H0494: 4, S0142: 4, L0769: 4, H0555: 4, L0750: 4, H0543: 4, H0341: 3, L0534: 3, H0486: 3, L0649: 3, |
| | | | | L0666: 3, H0658: 3, L0749: 3, L0758: 3, H0624: 2, S0040: 2, L0415: 2, H0261: 2, H0549: 2, H0550: 2, H0618: 2, H0052: 2, S0150: 2, L0805: 2, L0807: 2, L0657: 2, L0790: 2, |
| | | | | H0539: 2, S0380: 2, L0748: 2, L0747: 2, L0731: 2, L0759: 2, S0434: 2, H0685: 1, S0114: 1, H0583: 1, H0483: 1, H0255: 1, H0305: 1, H0589: 1, H0125: 1, L0539: 1, S0444: 1, |
| | | | | S0360: 1, H0729: 1, H0619: 1, S0278: 1, H0392: 1, H0592: 1, L3817: 1, H0485: 1, H0635: 1, S0280: 1, H0599: 1, H0042: 1, H0194: 1, |
| | | | | H0546: 1, H0046: 1, H0571: 1, H0050: 1, |
| | | | | H0620: 1, H0024: 1, H0594: 1, H0266: 1, H0416: 1, H0188: 1, H0290: 1, H0213: 1, H0031: 1, H0644: 1, H0628: 1, H0606: 1, |
| | | | | H0166: 1, H0169: 1, H0124: 1, S0366: 1, H0598: 1, |
| | | | | H0135: 1, H0038: 1, H0616: 1, H0087: 1, H0100: 1, H0429: 1, S0016: 1, H0561: 1, H0132: 1, H0646: 1, S0422: 1, L0598: 1, |
| | | | | H0529: 1, L0763: 1, L0638: 1, L4747: 1, L0761: 1, |
| | | | | L0800: 1, L0648: 1, L0774: 1, L0651: 1, L0378: 1, L0776: 1, L0629: 1, L0382: 1, L0788: 1, L0791: 1, L0663: 1, H0144: 1, H0593: 1, H0689: 1, H0659: 1, S0406: 1, S0037: 1, |
| | | | | L0745: 1, L0779: 1, L0752: 1, L0755: 1, S0394: 1, L0593: 1, S0026: 1, H0665: 1, H0542: 1, H0423: 1 and H0506: 1. |
| | HRACD15 | 706332 | 268 | |
| 142 | HRDFD27 | 567004 | 152 | AR104: 15, AR039: 9, AR313: 8, AR096: 7, AR089: 7, AR235: 7, AR060: 7, AR185: 6, AR218: 6, AR055: 6, AR180: 6, AR161: 6, AR162: 6, AR163: 6, AR226: 6, AR219: 6, |
| | | | | AR033: 6, AR299: 6, AR173: 5, AR165: 5, AR164: 5, AR166: 5, AR196: 5, AR300: 5, AR316: 4, AR257: 4, AR309: 4, AR171: 4, AR240: 4, AR176: 4, AR181: 4, AR179: 4, |
| | | | | AR214: 4, AR212: 4, AR175: 4, AR183: 4, AR269: 4, AR178: 4, AR237: 4, AR191: 4, AR275: 4, AR282: 4, AR262: 4, AR239: 4, AR277: 4, AR182: 4, AR264: 3, AR236: 3, |
| | | | | AR247: 3, AR229: 3, AR174: 3, AR274: 3, AR268: 3, AR234: 3, AR233: 3, AR238: 3, AR258: 3, AR216: 3, AR225: 3, AR200: 3, AR254: 3, AR231: 3, AR255: 3, AR228: 3, |
| | | | | AR211: 3, AR267: 3, AR293: 3, AR203: 3, AR285: 3, AR177: 3, AR296: 3, AR283: 3, AR169: 3, AR294: 3, AR266: 3, AR190: 3, AR290: 3, AR291: 3, AR189: 3, AR297: 2, |
| | | | | AR286: 2, AR217: 2, AR288: 2, AR053: 2, AR289: 2, AR222: 2, AR188: 2, AR287: 2, AR205: 2, AR263: 2, AR210: 2, AR227: 2, AR232: 2, AR312: 2, AR168: 2, AR204: 2, |
| | | | | AR230: 2, AR261: 2, AR308: 2, AR199: 2, AR270: 2, AR272: 1, AR271: 1, AR295: 1, AR260: 1, AR061: 1, AR195: 1, AR215: 1, |
| | | | | AR256: 1, AR193: 1, H0305: 2, H0124: 2 and |
| | | | | L0749: 1. |
| 143 | HSAVD46 | 456536 | 153 | AR176: 4, AR181: 4, AR178: 3, AR197: 3, AR269: 3, AR165: 3, AR221: 3, AR162: 3, AR164: 3, AR207: 3, AR272: 3, AR161: 3, AR182: 3, AR245: 3, AR175: 3, AR270: 3, |
| | | | | AR268: 2, AR174: 2, AR267: 2, AR177: 2, AR253: 2, AR191: 2, AR104: 2, AR173: 2, AR190: 2, AR225: 2, AR282: 2, AR188: 2, AR210: 2, AR311: 2, AR183: 2, AR179: 2, |
| | | | | AR204: 2, AR275: 2, AR166: 2, AR216: 2, AR212: 2, AR060: 1, AR271: 1, AR170: 1, AR240: 1, AR189: 1, AR096: 1, AR163: 1, AR180: 1, AR261: 1, AR283: 1, AR277: 1, |
| | | | | AR247: 1, AR033: 1, AR195: 1, AR217: 1, AR089: 1, AR312: 1, AR316: 1, AR055: 1, AR233: 1, AR289: 1, AR199: 1, AR185: 1, H0170: 1, S0114: 1, L0769: 1, L0784: 1, |
| | | | | L0805: 1, L0790: 1, H0435: 1, H0648: 1, L0779: 1 and L0777: 1. |
| 144 | HSAWZ41 | 580872 | 154 | AR313: 82, AR039: 58, AR173: 49, AR096: 43, AR196: 40, AR247: 40, AR162: 40, AR299: 40, AR165: 39, AR258: 38, AR161: 37, AR242: 37, AR300: 37, AR236: 37, |
| | | | | AR089: 37, AR164: 37, AR163: 36, AR166: 35, AR240: 35, AR180: 33, AR199: 32, AR229: 32, AR264: 31, AR175: 31, AR185: 31, AR257: 29, AR179: 29, AR178: 29, |
| | | | | AR312: 28, AR262: 28, AR183: 27, AR293: 27, AR234: 26, AR174: 26, AR193: 26, AR177: 26, AR316: 24, AR182: 24, AR218: 24, AR285: 24, AR191: 23, AR270: 23, |
| | | | | AR181: 23, AR277: 23, AR269: 23, AR219: 23, AR296: 23, AR226: 23, AR192: 22, AR275: 22, AR033: 22, AR233: 22, AR200: 21, AR189: 21, AR204: 21, AR176: 21, |
| | | | | AR238: 20, AR104: 20, AR297: 19, AR203: 19, AR261: 19, AR287: 19, AR294: 19, AR268: 18, AR060: 18, AR053: 18, AR286: 18, AR255: 17, AR212: 17, AR260: 17, |
| | | | | AR288: 16, AR290: 16, AR188: 16, AR309: 16, AR231: 15, AR197: 15, AR237: 15, AR230: 15, AR245: 15, AR295: 15, AR308: 15, AR267: 14, AR195: 14, AR266: 14, |
| | | | | AR282: 14, AR201: 14, AR213: 14, AR235: 14, AR254: 14, AR243: 14, AR228: 13, AR263: 13, AR271: 13, AR256: 13, AR239: 13, AR198: 12, AR227: 12, AR291: 12, |
| | | | | AR205: 11, AR272: 10, AR190: 10, AR055: 9, AR250: 9, AR252: 9, AR207: 9, AR289: 8, AR211: 8, AR283: 7, AR232: 7, AR246: 7, |
| | | | | AR311: 6, AR253: 5, AR061: 5, AR210: 5, |
| | | | | AR171: 4, AR221: 3, AR274: 2, AR168: 2, AR169: 1, H0305: 4, H0589: 2 and S0114: 1. |
| 145 | HSAYM40 | 462797 | 155 | AR250: 6, AR176: 6, AR309: 5, AR245: 5, AR053: 5, AR312: 5, AR162: 5, AR161: 5, AR163: 5, AR263: 4, AR246: 4, AR308: 4, AR198: 4, AR165: 4, AR164: 4, AR166: 4, |
| | | | | AR193: 3, AR243: 3, AR215: 3, AR264: 3, AR195: 3, AR213: 3, AR275: 3, AR311: 3, AR180: 3, AR173: 3, AR204: 3, AR271: 3, AR272: 3, AR055: 3, AR060: 3, AR252: 3, |
| | | | | AR270: 2, AR171: 2, AR201: 2, AR313: 2, AR300: 2, AR205: 2, AR291: 2, AR183: 2, AR282: 2, AR261: 2, AR172: 2, AR283: 2, AR274: 2, AR212: 2, AR269: 2, AR089: 2, |
| | | | | AR175: 2, AR233: 2, AR178: 2, AR033: 2, AR185: 2, AR299: 2, AR257: 2, AR182: 1, AR247: 1, AR260: 1, AR290: 1, AR168: 1, AR104: 1, AR316: 1, AR240: 1, AR039: 1, |
| | | | | AR235: 1, AR239: 1, AR216: 1, AR228: 1, AR255: 1, AR218: 1, AR267: 1, AR170: 1, AR210: 1, H0255: 2, S0114: 1 and L0766: 1. |
| 146 | HSDEZ20 | 1352287 | 156 | AR176: 5, AR252: 5, AR266: 5, AR215: 4, AR223: 4, AR181: 4, AR197: 4, AR161: 4, AR162: 4, AR264: 4, AR163: 3, AR235: 3, AR165: 3, AR164: 3, AR166: 3, AR309: 3, |
| | | | | AR207: 3, AR267: 3, AR214: 3, AR228: 3, AR182: 3, AR254: 3, AR178: 3, AR275: 3, AR295: 3, AR257: 3, AR179: 3, AR271: 3, AR183: 3, AR268: 3, AR172: 3, AR201: 3, |
| | | | | AR193: 3, AR236: 3, AR255: 3, AR240: 3, AR233: 3, AR229: 3, AR261: 3, AR262: 3, AR288: 3, AR289: 3, AR180: 2, AR175: 2, AR089: 2, AR296: 2, AR231: 2, AR299: 2, |
| | | | | AR274: 2, AR191: 2, AR216: 2, AR199: 2, AR239: 2, AR291: 2, AR173: 2, AR286: 2, AR238: 2, AR269: 2, AR237: 2, AR294: 2, AR270: 2, AR200: 2, AR060: 2, AR096: 2, |
| | | | | AR196: 2, AR168: 2, AR316: 2, AR174: 2, AR287: 2, AR195: 2, AR290: 2, AR055: 2, AR227: 2, AR177: 2, AR297: 2, AR203: 2, AR222: 2, AR300: 2, AR283: 2, AR234: 2, |
| | | | | AR185: 2, AR190: 2, AR247: 2, AR293: 2, AR217: 2, AR282: 2, AR224: 2, AR061: 2, AR053: 2, AR285: 2, AR226: 1, AR277: 1, AR312: 1, AR205: 1, AR272: 1, AR189: 1, |
| | | | | AR169: 1, AR232: 1, AR219: 1, AR033: 1, AR230: 1, AR260: 1, AR210: 1, AR211: 1, AR308: 1, AR104: 1, AR171: 1, S0031: 1 |
| | HSDEZ20 | 704101 | 269 | |
| 147 | HSDJA15 | 795252 | 157 | AR244: 23, AR281: 23, AR202: 20, AR284: 18, AR194: 18, AR206: 18, AR280: 17, AR315: 16, AR273: 16, AR241: 15, AR263: 15, AR310: 14, AR264: 13, AR314: 13, |
| | | | | AR243: 12, AR251: 12, AR205: 12, AR265: 12, AR292: 12, AR274: 11, AR198: 11, AR246: 11, AR248: 11, AR184: 11, AR271: 11, AR298: 11, AR283: 10, AR192: 10, |
| | | | | AR289: 10, AR033: 9, AR052: 9, AR286: 9, AR186: 9, AR295: 9, AR053: 9, AR309: 9, AR259: 9, AR282: 9, AR096: 9, AR218: 9, AR312: 9, AR204: 8, AR275: 8, AR104: 8, |
| | | | | AR311: 8, AR252: 8, AR313: 8, AR290: 8, AR253: 7, AR254: 7, AR266: 7, AR207: 7, AR285: 7, AR299: 7, AR249: 7, AR247: 7, AR039: 7, AR219: 7, AR213: 7, AR291: 7, |
| | | | | AR183: 6, AR293: 6, AR177: 6, AR245: 6, AR055: 6, AR308: 6, AR061: 6, AR250: 6, AR240: 6, AR256: 6, AR175: 6, AR268: 6, AR269: 5, AR294: 5, AR300: 5, AR277: 5, |
| | | | | AR258: 5, AR195: 5, AR165: 5, AR089: 5, AR185: 5, AR316: 5, AR164: 5, AR166: 5, AR270: 5, AR296: 5, AR161: 5, AR162: 4, AR163: 4, AR223: 4, AR267: 4, AR232: 4, |
| | | | | AR212: 4, AR060: 4, AR235: 4, AR182: 4, AR176: 4, AR238: 4, AR197: 4, AR193: 3, AR169: 3, AR233: 3, AR229: 3, AR224: 3, AR226: 3, AR242: 3, AR231: 3, AR227: 3, |
| | | | | AR179: 3, AR237: 3, AR201: 3, AR180: 3, AR234: 2, AR174: 2, AR196: 2, AR272: 2, AR214: 2, AR178: 2, AR168: 2, AR221: 2, AR257: 2, AR287: 2, AR288: 2, AR171: 2, |
| | | | | AR190: 1, AR189: 1, AR261: 1, AR191: 1, AR172: 1, AR188: 1, AR236: 1, AR239: 1 |
| 148 | HSDSB09 | 1301498 | 158 | AR060: 10, AR089: 9, AR055: 7, AR104: 7, AR313: 5, AR039: 4, AR218: 4, AR299: 4, AR184: 4, AR316: 4, AR096: 4, AR182: 4, AR219: 3, AR294: 3, AR185: 3, AR214: 3, |
| | | | | AR197: 3, AR291: 3, AR212: 3, AR251: 3, AR284: 3, AR283: 3, AR282: 3, AR222: 3, AR269: 3, AR286: 3, AR298: 2, AR266: 2, AR052: 2, AR262: 2, AR249: 2, AR311: 2, |
| | | | | AR292: 2, AR309: 2, AR295: 2, AR233: 2, AR236: 2, AR296: 2, AR268: 2, AR267: 2, AR253: 2, AR270: 2, AR255: 2, AR183: 2, AR285: 2, AR165: 2, AR177: 2, AR228: 2, |
| | | | | AR289: 2, AR061: 2, AR186: 2, AR300: 2, AR168: 2, AR033: 2, AR239: 2, AR235: 1, AR231: 1, AR215: 1, AR277: 1, AR225: 1, AR290: 1, AR274: 1, AR293: 1, AR163: 1, |
| | | | | AR247: 1, AR310: 1, AR217: 1, AR226: 1, AR238: 1, AR240: 1, AR265: 1, AR237: 1, AR264: 1, AR224: 1, AR229: 1, AR053: 1, AR172: 1, AR271: 1, L0803: 14, L0774: 4, |
| | | | | L0770: 2, H0409: 1, H0331: 1 and H0555: 1. |
| | HSDSB09 | 463645 | 270 | |
| 149 | HSFAM31 | 552789 | 159 | AR173: 8, AR178: 6, AR183: 6, AR313: 6, AR293: 6, AR229: 6, AR180: 6, AR182: 5, AR270: 5, AR175: 5, AR269: 5, AR162: 5, AR161: 5, AR181: 5, AR163: 5, AR257: 5, |
| | | | | AR291: 4, AR282: 4, AR176: 4, AR238: 4, AR165: 4, AR226: 4, AR164: 4, AR195: 4, AR228: 4, AR166: 4, AR296: 4, AR272: 4, AR258: 4, AR179: 4, AR263: 4, AR268: 4, |
| | | | | AR199: 4, AR247: 4, AR300: 4, AR274: 4, AR266: 3, AR039: 3, AR297: 3, AR294: 3, AR233: 3, AR230: 3, AR264: 3, AR286: 3, AR285: 3, AR191: 3, AR213: 3, AR177: 3, |
| | | | | AR234: 3, AR239: 3, AR267: 3, AR290: 3, AR275: 3, AR196: 3, AR174: 3, AR287: 3, AR231: 3, AR299: 3, AR189: 3, AR193: 3, AR262: 3, AR295: 3, AR240: 3, AR237: 3, |
| | | | | AR096: 3, AR053: 3, AR227: 3, AR170: 3, AR289: 3, AR200: 3, AR218: 3, AR255: 2, AR260: 2, AR288: 2, AR309: 2, AR089: 2, AR261: 2, AR188: 2, AR219: 2, AR210: 2, |
| | | | | AR250: 2, AR033: 2, AR185: 2, AR316: 2, AR277: 2, AR203: 2, AR312: 2, AR201: 2, AR224: 2, AR060: 2, AR190: 2, AR232: 2, AR216: 2, AR207: 2, AR168: 2, AR172: 1, |
| | | | | AR311: 1, AR055: 1, AR256: 1, AR236: 1, AR061: 1, AR192: 1, AR205: 1, AR225: 1, AR104: 1, H0154: 1 and H0087: 1. |
| 150 | HSHAX21 | 612823 | 160 | AR264: 11, AR309: 8, AR253: 8, AR250: 8, AR252: 8, AR254: 7, AR308: 7, AR263: 7, AR172: 7, AR271: 7, AR162: 7, AR272: 6, AR311: 6, AR165: 6, AR195: 6, AR245: 6, |
| | | | | AR161: 6, AR166: 6, AR163: 5, AR312: 5, AR212: 5, AR214: 5, AR164: 5, AR176: 5, AR275: 5, AR205: 5, AR197: 5, AR226: 5, AR282: 5, AR053: 5, AR089: 5, AR213: 4, |
| | | | | AR169: 4, AR181: 4, AR170: 4, AR268: 4, AR171: 4, AR198: 4, AR192: 4, AR096: 4, AR174: 4, AR290: 4, AR269: 4, AR189: 4, AR177: 4, AR196: 3, AR173: 3, AR201: 3, |
| | | | | AR224: 3, AR246: 3, AR222: 3, AR316: 3, AR168: 3, AR300: 3, AR223: 3, AR182: 3, AR274: 3, AR180: 3, AR229: 3, AR217: 3, AR216: 3, AR243: 3, AR313: 3, AR204: 3, |
| | | | | AR178: 3, AR190: 3, AR039: 3, AR255: 3, AR238: 3, AR188: 3, AR060: 3, AR193: 3, AR207: 2, AR296: 2, AR218: 2, AR191: 2, AR228: 2, AR185: 2, AR240: 2, AR219: 2, |
| | | | | AR239: 2, AR231: 2, AR262: 2, AR247: 2, AR233: 2, AR287: 2, AR299: 2, AR257: 2, AR289: 2, AR232: 2, AR267: 2, AR033: 2, AR288: 2, AR199: 2, AR266: 2, AR200: 2, |
| | | | | AR175: 2, AR061: 2, AR179: 2, AR055: 2, AR236: 2, AR237: 2, AR227: 1, AR104: 1, AR285: 1, AR293: 1, AR234: 1, AR203: 1, AR210: 1, AR277: 1, L0754: 6, S0422: 4, |
| | | | | L0803: 4, L0766: 3, L0659: 3, H0638: 2, S0442: 2, S0360: 2, H0392: 2, L0794: 2, L0649: 2, L0806: 2, L0518: 2, L0663: 2, L0665: 2, H0659: 2, L0759: 2, S0436: 2, L0588: 2, |
| | | | | L0605: 2, H0657: 1, S0356: 1, S0444: 1, H0747: 1, L0717: 1, L3388: 1, H0600: 1, H0156: 1, H0251: 1, H0375: 1, S0003: 1, H0032: 1, |
| | | | | H0634: 1, H0616: 1, H0561: 1, L3904: 1, |
| | | | | L0773: 1, L0662: 1, L0768: 1, L0388: 1, L0775: 1, L0655: 1, L0661: 1, L0666: 1, S0053: 1, L0438: 1, H0547: 1, H0436: 1, S0037: 1, L0748: 1, L0779: 1, L0731: 1, L0758: 1, |
| | | | | L0581: 1 and S0026: 1. |
| 151 | HSQCM10 | 638591 | 161 | AR261: 16, AR296: 15, AR309: 15, AR161: 14, AR163: 14, AR162: 14, AR291: 12, AR295: 10, AR177: 10, AR264: 9, AR287: 9, AR165: 9, AR285: 9, AR166: 9, AR297: 8, |
| | | | | AR275: 8, AR164: 8, AR181: 8, AR288: 8, AR235: 8, AR196: 7, AR176: 7, AR293: 7, AR053: 7, AR089: 7, AR255: 7, AR286: 7, AR257: 7, AR229: 7, AR262: 7, AR173: 6, |
| | | | | AR231: 6, AR266: 6, AR312: 6, AR178: 6, AR239: 6, AR233: 6, AR200: 6, AR207: 6, AR197: 6, AR289: 6, AR238: 6, AR247: 6, AR228: 6, AR096: 6, AR294: 6, AR240: 6, |
| | | | | AR237: 5, AR308: 5, AR269: 5, AR190: 5, AR189: 5, AR316: 5, AR271: 5, AR191: 5, AR226: 5, AR272: 5, AR174: 5, AR225: 5, AR274: 5, AR185: 5, AR268: 5, AR061: 5, |
| | | | | AR179: 5, AR290: 5, AR215: 5, AR263: 5, AR060: 4, AR199: 4, AR212: 4, AR183: 4, AR300: 4, AR168: 4, AR193: 4, AR188: 4, AR175: 4, AR246: 4, AR243: 4, AR299: 4, |
| | | | | AR313: 4, AR203: 4, AR230: 4, AR055: 4, AR311: 4, AR282: 4, AR234: 4, AR258: 4, AR195: 4, AR218: 4, AR180: 4, AR283: 4, AR169: 4, AR254: 4, AR104: 4, AR232: 4, |
| | | | | AR267: 4, AR219: 3, AR201: 3, AR213: 3, AR253: 3, AR182: 3, AR227: 3, AR245: 3, AR236: 3, AR039: 3, AR210: 3, AR256: 3, AR260: 3, AR170: 3, AR270: 3, AR204: 3, |
| | | | | AR211: 3, AR171: 3, AR277: 2, AR217: 2, AR033: 2, AR205: 2, AR216: 2, AR222: 2, AR224: 2, L0747: 8, L0659: 7, L0776: 5, L0770: 4, L0662: 4, L0768: 4, L0775: 4, |
| | | | | L0752: 4, L0603: 4, H0556: 3, S0410: 3, L0764: 3, L0665: 3, L0439: 3, L0750: 3, S0356: 2, S0408: 2, L0471: 2, H0271: 2, S0440: 2, L0762: 2, L0769: 2, L0372: 2, L0646: 2, |
| | | | | L0773: 2, L0766: 2, L0649: 2, L0655: 2, L0663: 2, L0664: 2, H0144: 2, L0565: 2, H0547: 2, H0690: 2, H0659: 2, L0602: 2, S0404: 2, L0754: 2, L0749: 2, L0777: 2, L0758: 2, |
| | | | | L0596: 2, H0657: 1, S0001: 1, H0484: 1, H0638: 1, S0418: 1, S0444: 1, L0717: 1, H0333: 1, H0156: 1, H0052: 1, H0545: 1, |
| | | | | H0012: 1, H0083: 1, H0687: 1, H0674: 1, H0090: 1, |
| | | | | H0063: 1, H0264: 1, H0100: 1, L0434: 1, L0351: 1, H0494: 1, H0561: 1, S0466: 1, H0641: 1, H0529: 1, L0763: 1, L0761: 1, L0667: 1, L0363: 1, L0650: 1, L0653: 1, L0654: 1, |
| | | | | L0379: 1, L0607: 1, L0807: 1, L0635: 1, L0783: 1, L0383: 1, L0809: 1, L0666: 1, H0658: 1, H0670: 1, H0648: 1, H0521: 1, S0406: 1, L0748: 1, L0731: 1, L0593: 1, L0595: 1, |
| | | | | S0026: 1, S0276: 1 and H0422: 1. |
| 152 | HSSGD52 | 1352343 | 162 | AR225: 17, AR223: 16, AR215: 16, AR214: 14, AR224: 13, AR170: 13, AR217: 12, AR168: 12, AR172: 12, AR221: 12, AR246: 11, AR222: 11, AR216: 11, AR269: 11, |
| | | | | AR169: 11, AR171: 10, AR183: 9, AR268: 9, AR165: 8, AR290: 8, AR161: 8, AR164: 8, AR162: 8, AR270: 8, AR163: 8, |
| | | | | AR166: 8, AR291: 7, AR244: 7, AR298: 7, AR267: 7, |
| | | | | AR182: 7, AR180: 7, AR266: 7, AR176: 7, AR186: 7, AR173: 7, AR052: 6, AR231: 6, AR271: 6, AR207: 6, AR292: 6, AR250: 6, AR228: 6, AR282: 6, AR238: 6, AR206: 6, |
| | | | | AR061: 6, AR273: 6, AR296: 6, AR275: 6, AR243: 6, AR181: 6, AR247: 5, AR289: 5, AR285: 5, AR200: 5, AR240: 5, AR210: 5, AR053: 5, AR249: 5, AR314: 5, AR241: 5, |
| | | | | AR202: 5, AR218: 5, AR219: 5, AR235: 5, AR194: 5, AR178: 5, AR197: 5, AR089: 5, AR189: 5, AR177: 5, AR211: 5, AR239: 5, AR175: 5, AR237: 5, AR198: 5, AR293: 5, |
| | | | | AR201: 5, AR190: 5, AR188: 5, AR295: 5, AR251: 5, AR255: 5, AR245: 4, AR280: 4, AR254: 4, AR185: 4, AR196: 4, AR060: 4, AR272: 4, AR315: 4, AR213: 4, AR312: 4, |
| | | | | AR300: 4, AR193: 4, AR309: 4, AR316: 4, AR257: 4, AR179: 4, AR232: 4, AR311: 4, AR234: 4, AR233: 4, AR236: 4, AR264: 4, AR286: 4, AR299: 4, AR294: 4, AR204: 4, |
| | | | | AR033: 4, AR229: 4, AR039: 4, AR226: 4, AR191: 4, AR205: 4, AR184: 3, AR288: 3, AR274: 3, AR096: 3, AR261: 3, AR287: 3, AR203: 3, AR297: 3, AR284: 3, AR174: 3, |
| | | | | AR212: 3, AR277: 3, AR055: 3, AR313: 3, AR192: 3, AR104: 3, AR195: 3, AR265: 3, AR281: 3, AR230: 3, AR263: 3, AR262: 3, AR283: 3, AR256: 2, AR199: 2, AR227: 2, |
| | | | | AR308: 2, AR310: 2, AR259: 2, AR253: 2, AR258: 2, AR260: 2, AR242: 2, L0771: 6, L0743: 6, S0002: 5, L0770: 5, L0803: 5, |
| | | | | L0805: 5, L0659: 5, L0666: 5, L0751: 5, H0585: 4, |
| | | | | L0809: 4, L0439: 4, L0754: 4, L0758: 4, H0586: 3, H0013: 3, H0551: 3, S0426: 3, L0769: 3, L0664: 3, L0665: 3, L0779: 3, L0780: 3, L0752: 3, L0757: 3, H0265: 2, S0376: 2, |
| | | | | L2799: 2, S0278: 2, H0392: 2, H0409: 2, L3816: 2, H0644: 2, H0135: 2, H0494: 2, S0142: 2, L0773: 2, L0789: 2, L0790: 2, L0663: 2, H0519: 2, H0658: 2, H0670: 2, H0521: 2, |
| | | | | L0744: 2, L0740: 2, L0749: 2, L0731: 2, S0276: 2, L3618: 2, H0624: 1, H0556: 1, H0141: 1, H0222: 1, S0342: 1, H0295: 1, T0049: 1, L2910: 1, S0212: 1, H0484: 1, S0418: 1, |
| | | | | S0442: 1, S0358: 1, S0444: 1, H0580: 1, S0007: 1, S0045: 1, S0476: 1, H0771: 1, L3104: 1, L0717: 1, H0549: 1, H0370: 1, H0486: 1, L2504: 1, L2570: 1, H0250: 1, S0010: 1, |
| | | | | S0346: 1, H0581: 1, S0049: 1, H0263: 1, H0046: 1, H0009: 1, H0123: 1, H0266: 1, H0687: 1, T0023: 1, L0483: 1, H0030: 1, |
| | | | | S0366: 1, H0038: 1, H0634: 1, T0067: 1, H0413: 1, |
| | | | | H0334: 1, L0065: 1, S0440: 1, S0144: 1, H0773: 1, L0763: 1, L3905: 1, L0761: 1, L0372: 1, L0646: 1, L0800: 1, L0643: 1, L0764: 1, L0648: 1, L0662: 1, L0794: 1, L0804: 1, |
| | | | | L0774: 1, L0775: 1, L0806: 1, L0776: 1, L0655: 1, L0527: 1, L0782: 1, L0791: 1, L0793: 1, S0052: 1, L2257: 1, L2259: 1, L2654: 1, L0565: 1, S0148: 1, H0593: 1, S0126: 1, |
| | | | | H0682: 1, H0684: 1, H0435: 1, S0328: 1, S0380: 1, H0710: 1, L3834: 1, H0696: 1, S0044: 1, S0146: 1, S0392: 1, H0627: 1, L0747: 1, L0750: 1, L0777: 1, L0759: 1, S0434: 1, |
| | | | | S0026: 1, H0665: 1, H0136: 1 and H0542: 1. |
| | HSSGD52 | 845666 | 271 | |
| 153 | HSSJC35 | 1306937 | 163 | AR238: 16, AR227: 11, AR239: 10, AR228: 9, AR061: 9, AR232: 8, AR310: 8, AR233: 8, AR264: 8, AR161: 7, AR162: 7, |
| | | | | AR263: 7, AR183: 7, AR163: 7, AR268: 7, AR237: 7, |
| | | | | AR182: 7, AR265: 7, AR270: 7, AR289: 7, AR266: 7, AR215: 7, AR180: 7, AR291: 6, AR298: 6, AR226: 6, AR288: 6, AR269: 6, AR234: 6, AR284: 6, AR225: 6, AR297: 5, |
| | | | | AR313: 5, AR311: 5, AR171: 5, AR290: 5, AR176: 5, AR181: 5, AR053: 5, AR309: 5, AR229: 5, AR255: 5, AR169: 4, AR294: 4, AR308: 4, AR282: 4, AR286: 4, AR257: 4, |
| | | | | AR251: 4, AR258: 4, AR293: 4, AR267: 4, AR216: 4, AR173: 4, AR261: 4, AR285: 4, AR165: 4, AR292: 4, AR262: 4, AR287: 4, AR164: 4, AR230: 4, AR312: 4, AR175: 4, |
| | | | | AR295: 4, AR166: 4, AR217: 3, AR236: 3, AR210: 3, AR296: 3, AR060: 3, AR273: 3, AR231: 3, AR196: 3, AR300: 3, AR052: 3, AR277: 3, AR184: 3, AR200: 3, AR033: 3, |
| | | | | AR172: 3, AR299: 3, AR259: 3, AR223: 3, AR096: 3, AR179: 3, AR191: 3, AR177: 3, AR256: 3, AR240: 3, AR316: 3, AR190: 3, AR245: 3, AR203: 3, AR186: 3, AR254: 3, |
| | | | | AR055: 2, AR178: 2, AR247: 2, AR272: 2, AR246: 2, AR174: 2, AR213: 2, AR280: 2, AR188: 2, AR248: 2, AR189: 2, AR260: 2, AR207: 2, AR222: 2, AR274: 2, AR253: 2, |
| | | | | AR224: 2, AR089: 2, AR283: 2, AR275: 2, AR039: 2, AR104: 2, AR235: 2, AR185: 1, AR221: 1, AR205: 1, AR211: 1, AR199: 1, AR243: 1, AR219: 1, AR214: 1, AR218: 1, |
| | | | | AR195: 1, AR281: 1, AR204: 1, L0803: 9, L0794: 6, H0617: 5, H0722: 3, L0759: 3, H0135: 2, H0087: 2, L0774: 2, S0406: 2, |
| | | | | H0543: 2, S0444: 1, H0550: 1, H0559: 1, H0486: 1, |
| | | | | H0581: 1, H0046: 1, H0083: 1, T0041: 1, T0042: 1, S0438: 1, H0529: 1, L0761: 1, L0643: 1, L0766: 1, L0657: 1, L0659: 1, L0791: 1, L2257: 1, H0520: 1, S0378: 1, L0611: 1, |
| | | | | L0749: 1, H0445: 1 and H0506: 1. |
| | HSSJC35 | 745409 | 272 | |
| | HSSJC35 | 716424 | 273 | |
| 154 | HSXEC75 | 634032 | 164 | AR089: 8, AR253: 8, AR176: 8, AR060: 7, AR055: 7, AR161: 6, AR162: 6, AR163: 6, AR245: 6, AR177: 6, AR309: 5, AR269: 5, AR271: 5, AR165: 5, AR239: 5, AR226: 5, |
| | | | | AR180: 5, AR164: 5, AR181: 5, AR250: 5, AR207: 5, AR174: 5, AR299: 5, AR224: 5, AR246: 5, AR166: 5, AR266: 5, AR229: 5, AR104: 5, AR182: 4, AR189: 4, AR183: 4, |
| | | | | AR238: 4, AR233: 4, AR283: 4, AR237: 4, AR313: 4, AR193: 4, AR275: 4, AR270: 4, AR243: 4, AR053: 4, AR268: 4, AR272: 4, AR228: 4, AR300: 4, AR185: 4, AR282: 3, |
| | | | | AR201: 3, AR267: 3, AR316: 3, AR191: 3, AR178: 3, AR190: 3, AR232: 3, AR240: 3, AR264: 3, AR179: 3, AR205: 3, AR096: 3, AR311: 3, AR291: 3, AR231: 3, AR235: 3, |
| | | | | AR033: 3, AR198: 3, AR197: 3, AR227: 3, AR261: 3, AR061: 3, AR175: 3, AR312: 3, AR236: 3, AR214: 2, AR257: 2, AR215: 2, AR234: 2, AR289: 2, AR204: 2, AR217: 2, |
| | | | | AR247: 2, AR225: 2, AR277: 2, AR039: 2, AR222: 2, AR203: 2, AR188: 2, AR199: 2, AR196: 2, AR288: 2, AR218: 2, AR286: 2, AR274: 2, AR308: 2, AR290: 2, AR212: 2, |
| | | | | AR262: 2, AR293: 2, AR171: 2, AR295: 2, AR223: 2, AR296: 2, AR230: 1, AR260: 1, AR172: 1, AR255: 1, AR195: 1, AR213: 1, AR200: 1, AR173: 1, H0032: 3, L0438: 3, |
| | | | | L0758: 3, S0376: 2, L0439: 2, S0418: 1, S0410: 1, H0574: 1, H0156: 1, H0036: 1, S0010: 1, S0474: 1, H0581: 1, T0110: 1, S0214: 1, S0036: 1, H0591: 1, H0038: 1, H0634: 1, |
| | | | | H0494: 1, L0796: 1, L0372: 1, L0803: 1, L0804: 1, L0666: 1, L0664: 1, L0565: 1, H0539: 1, S0378: 1, L0749: 1, L0779: 1, L0731: 1 and S0260: 1. |
| 155 | HSYAZ50 | 1027673 | 165 | S0206: 29, H0521: 13, L0747: 13, H0266: 10, H0457: 9, L0758: 9, H0556: 8, L0742: 7, H0620: 6, H0040: 6, H0543: 6, H0619: 5, S0278: 5, S0250: 5, H0529: 5, L0766: 5, |
| | | | | H0662: 4, H0638: 4, H0370: 4, S0372: 4, L0770: 4, L0659: 4, S3014: 4, L0748: 4, L0756: 4, L0591: 4, H0423: 4, H0265: 3, H0341: 3, H0663: 3, S0442: 3, S0222: 3, H0545: 3, |
| | | | | H0012: 3, H0024: 3, H0644: 3, H0551: 3, H0623: 3, L0475: 3, S0142: 3, L0771: 3, L0662: 3, L0794: 3, L0783: 3, H0519: 3, S0126: 3, S0037: 3, L0439: 3, L0740: 3, L0754: 3, |
| | | | | L0750: 3, L0752: 3, L0755: 3, L0731: 3, L0588: 3, H0422: 3, S0424: 3, S0114: 2, S0420: 2, H0741: 2, S0045: 2, S0476: 2, H0587: 2, H0574: 2, H0635: 2, H0575: 2, S0346: 2, |
| | | | | H0581: 2, H0046: 2, L0163: 2, H0031: 2, S0364: 2, H0135: 2, H0038: 2, H0056: 2, T0042: 2, H0494: 2, S0438: 2, S0150: 2, H0647: 2, L0763: 2, L0764: 2, L0803: 2, L0809: 2, |
| | | | | H0539: 2, H0522: 2, L0741: 2, L0749: 2, H0445: 2, S0194: 2, S0276: 2, S0458: 2, T0002: 1, H0159: 1, S0342: 1, H0294: 1, S0134: 1, S0218: 1, H0650: 1, H0656: 1, L3814: 1, |
| | | | | S0116: 1, S0212: 1, H0402: 1, S0418: 1, S0356: 1, S0358: 1, H0730: 1, H0208: 1, S0132: 1, H0645: 1, H0393: 1, H0351: 1, H0437: 1, H0431: 1, H0455: 1, H0592: 1, H0586: 1, |
| | | | | H0333: 1, L3816: 1, H0013: 1, H0069: 1, S0280: 1, T0082: 1, H0036: 1, H0618: 1, H0253: 1, H0318: 1, S0049: 1, H0251: 1, |
| | | | | H0263: 1, H0597: 1, H0563: 1, H0571: 1, H0081: 1, |
| | | | | H0023: 1, H0051: 1, S0051: 1, H0083: 1, H0629: 1, H0267: 1, H0687: 1, S0003: 1, H0252: 1, H0039: 1, T0023: 1, H0424: 1, H0553: 1, |
| | | | | H0628: 1, H0606: 1, H0212: 1, S0036: 1, |
| | | | | H0063: 1, H0058: 1, H0433: 1, H0560: 1, H0561: 1, S0440: 1, H0641: 1, S0344: 1, H0538: 1, S0002: 1, L0369: 1, L0371: 1, L0769: 1, L0638: 1, L5566: 1, L0667: 1, L0772: 1, |
| | | | | L0773: 1, L0648: 1, L0767: 1, L0768: 1, L0649: 1, L0650: 1, L0775: 1, L0805: 1, L0653: 1, L0776: 1, L0606: 1, L0629: 1, L0807: 1, L0518: 1, L0382: 1, L5623: 1, L0791: 1, |
| | | | | L0663: 1, H0701: 1, L3826: 1, H0520: 1, H0547: 1, H0682: 1, H0435: 1, H0658: 1, H0651: 1, S0328: 1, S0330: 1, S0152: 1, S0044: 1, H0436: 1, S3012: 1, L0751: 1, L0596: 1, |
| | | | | L0605: 1, L0593: 1, S0026: 1 and H0721: 1. |
| | HSYAZ50 | 852318 | 274 | |
| | HSYAZ50 | 902235 | 275 | |
| | HSYAZ50 | 882732 | 276 | |
| 156 | HSYBG37 | 1056317 | 166 | AR216: 52, AR214: 45, AR205: 44, AR215: 39, AR199: 38, AR274: 34, AR222: 33, AR217: 33, AR225: 33, AR172: 31, AR171: 30, AR168: 30, AR223: 29, AR245: 28, |
| | | | | AR169: 28, AR224: 27, AR170: 27, AR210: 25, AR221: 24, AR272: 24, AR175: 23, AR247: 22, AR246: 22, AR195: 21, AR213: 21, AR218: 20, AR212: 20, AR189: 19, |
| | | | | AR211: 19, AR053: 19, AR188: 18, AR089: 18, AR096: 18, AR173: 18, AR185: 18, AR191: 17, AR312: 17, AR164: 16, AR299: 16, AR104: 16, AR174: 16, AR219: 16, |
| | | | | AR192: 16, AR177: 16, AR313: 16, AR161: 16, AR163: 16, AR162: 16, AR275: 16, AR039: 15, AR166: 15, AR165: 15, AR197: 15, AR236: 15, AR291: 15, AR190: 15, |
| | | | | AR254: 14, AR290: 14, AR261: 14, AR316: 14, AR240: 14, AR282: 14, AR183: 14, AR182: 14, AR179: 14, AR311: 13, AR181: 13, AR060: 13, AR271: 13, AR256: 13, |
| | | | | AR295: 13, AR288: 13, AR250: 13, AR266: 12, AR243: 12, AR242: 12, AR268: 12, AR262: 12, AR309: 12, AR308: 12, AR178: 12, AR267: 12, AR270: 12, AR200: 12, |
| | | | | AR300: 12, AR196: 12, AR269: 12, AR203: 12, AR296: 11, AR198: 11, AR180: 11, AR283: 11, AR255: 10, AR257: 10, AR277: 10, AR230: 10, AR252: 10, AR239: 9, |
| | | | | AR289: 9, AR231: 9, AR263: 9, AR297: 9, AR285: 9, AR201: 9, AR237: 9, AR238: 9, AR293: 9, AR204: 9, AR033: 9, AR264: 9, AR253: 8, AR260: 8, AR061: 8, AR193: 8, |
| | | | | AR229: 8, AR287: 8, AR258: 8, AR232: 7, AR176: 7, AR234: 7, AR233: 7, AR294: 6, AR226: 6, AR286: 6, AR227: 6, AR235: 6, AR055: 5, AR228: 4, AR207: 4, L0770: 3, |
| | | | | S0442: 2, S0358: 2, L0769: 2, S0380: 2, H0717: 1, S6024: 1, H0656: 1, H0341: 1, H0409: 1, H0486: 1, L2637: 1, T0060: 1, H0156: 1, H0036: 1, H0421: 1, H0052: 1, H0544: 1, |
| | | | | H0551: 1, H0059: 1, S0142: 1, L3904: 1, L3905: 1, L0378: 1, L5622: 1, L0709: 1, L2263: 1, L3811: 1, H0547: 1, L0602: 1, L0611: 1, L0742: 1, L0748: 1, L0439: 1, L0756: 1, |
| | | | | L0777: 1, L0731: 1, S0434: 1 and L0599: 1. |
| | HSYBG37 | 581098 | 277 | |
| 157 | HSZAF47 | 1352172 | 167 | AR253: 151, AR250: 141, AR254: 138, AR296: 108, AR260: 100, AR252: 98, AR294: 96, AR180: 90, AR197: 87, AR207: 87, AR256: 86, AR266: 85, AR293: 82, AR297: 81, |
| | | | | AR204: 81, AR198: 80, AR176: 78, AR286: 78, AR181: 77, AR242: 76, AR245: 75, AR243: 74, AR235: 73, AR210: 73, AR289: 72, AR257: 72, AR192: 71, AR033: 70, |
| | | | | AR200: 70, AR203: 68, AR285: 68, AR246: 68, AR287: 66, AR211: 66, AR178: 66, AR258: 65, AR237: 63, AR201: 62, AR053: 62, AR195: 62, AR295: 61, AR212: 60, |
| | | | | AR234: 60, AR175: 60, AR271: 58, AR230: 58, AR261: 57, AR233: 57, AR229: 57, AR275: 56, AR309: 55, AR177: 55, AR183: 55, AR213: 55, AR199: 54, AR179: 53, |
| | | | | AR272: 53, AR300: 52, AR269: 52, AR060: 52, AR055: 51, AR191: 51, AR205: 50, AR262: 50, AR228: 50, AR291: 50, AR182: 50, AR240: 49, AR173: 48, AR288: 47, |
| | | | | AR190: 47, AR236: 47, AR193: 47, AR239: 47, AR268: 46, AR174: 46, AR188: 46, AR227: 46, AR255: 45, AR196: 45, AR283: 45, AR290: 44, AR039: 44, AR231: 43, |
| | | | | AR185: 42, AR232: 42, AR264: 42, AR218: 41, AR270: 41, AR189: 41, AR274: 40, AR282: 40, AR219: 40, AR267: 40, AR061: 39, AR170: 38, AR238: 37, AR312: 36, |
| | | | | AR104: 36, AR299: 36, AR226: 34, AR316: 34, AR172: 34, AR169: 31, AR171: 31, AR247: 29, AR161: 29, AR311: 29, AR162: 28, AR225: 27, AR163: 27, AR096: 27, |
| | | | | AR089: 26, AR168: 26, AR313: 26, AR165: 25, AR263: 24, AR164: 24, AR308: 23, AR166: 23, AR223: 22, AR277: 21, AR217: 21, AR221: 20, AR224: 20, AR216: 19, |
| | | | | AR222: 18, AR215: 15, AR214: 14, H0013: 1, H0321: 1, L0792: 1 and L0779: 1. |
| | HSZAF47 | 456551 | 278 | |
| 158 | HTADX17 | 753289 | 168 | AR227: 8, AR293: 7, AR176: 7, AR233: 7, AR229: 7, AR232: 6, AR179: 6, AR182: 6, AR237: 6, AR296: 6, AR266: 6, AR060: 5, AR294: 5, AR055: 5, AR287: 5, AR252: 4, |
| | | | | AR286: 4, AR185: 4, AR239: 4, AR255: 4, AR200: 4, AR230: 4, AR271: 4, AR221: 3, AR289: 3, AR282: 3, AR297: 3, AR162: 3, AR089: 3, AR291: 3, AR290: 3, AR275: 3, |
| | | | | AR257: 3, AR096: 3, AR253: 2, AR270: 2, AR175: 2, AR242: 2, AR228: 2, AR316: 2, AR061: 2, AR262: 2, AR269: 2, AR172: 2, AR161: 2, AR300: 2, AR168: 2, AR283: 2, |
| | | | | AR183: 2, AR181: 2, AR205: 2, AR231: 2, AR177: 2, AR267: 2, AR261: 2, AR033: 2, AR264: 2, AR225: 2, AR195: 2, AR277: 2, AR215: 2, AR313: 2, AR214: 2, AR238: 2, |
| | | | | AR173: 2, AR197: 2, AR039: 2, AR201: 2, AR268: 2, AR104: 2, AR246: 2, AR218: 2, AR188: 2, AR288: 2, AR216: 2, AR299: 2, AR285: 2, AR234: 1, AR309: 1, AR169: 1, |
| | | | | AR240: 1, AR224: 1, AR174: 1, AR190: 1, AR165: 1, AR274: 1, AR178: 1, AR217: 1, AR260: 1, AR196: 1, AR191: 1, AR204: 1, AR311: 1, AR166: 1, AR222: 1, AR210: 1, |
| | | | | AR171: 1, AR199: 1, AR258: 1, H0069: 5, H0634: 1 and L0772: 1. |
| | HTADX17 | 457172 | 279 | |
| 159 | HTEAF65 | 866485 | 169 | AR207: 26, AR195: 26, AR263: 17, AR283: 16, AR245: 15, AR277: 15, AR213: 14, AR311: 14, AR192: 14, AR282: 14, AR212: 14, AR308: 13, AR246: 13, AR193: 13, |
| | | | | AR089: 13, AR309: 13, AR264: 13, AR165: 13, AR205: 13, AR164: 12, AR166: 12, AR242: 12, AR162: 12, AR161: 12, AR163: 12, AR055: 11, AR197: 11, AR170: 11, |
| | | | | AR198: 11, AR222: 11, AR316: 11, AR225: 11, AR217: 11, AR261: 11, AR214: 10, AR096: 10, AR033: 10, AR295: 10, AR223: 10, AR215: 10, AR104: 10, AR224: 10, |
| | | | | AR299: 10, AR240: 10, AR172: 10, AR201: 10, AR252: 9, AR039: 9, AR169: 9, AR060: 9, AR216: 9, AR218: 9, AR053: 9, |
| | | | | AR204: 9, AR221: 9, AR177: 9, AR171: 9, AR313: 9, |
| | | | | AR219: 9, AR288: 9, AR272: 9, AR168: 9, AR312: 8, AR196: 8, AR285: 8, AR185: 8, AR253: 8, AR286: 8, AR243: 7, AR297: 7, AR181: 7, AR229: 7, AR250: 7, AR174: 7, |
| | | | | AR274: 7, AR235: 7, AR300: 7, AR211: 6, AR271: 6, AR275: 6, AR266: 6, AR291: 6, AR289: 6, AR287: 6, AR247: 6, AR176: 6, AR210: 6, AR293: 5, AR239: 5, AR175: 5, |
| | | | | AR191: 5, AR178: 5, AR226: 5, AR183: 5, AR238: 5, AR180: 5, AR199: 5, AR257: 5, AR262: 5, AR189: 5, AR173: 5, AR203: 5, AR231: 5, AR230: 5, AR233: 5, AR237: 5, |
| | | | | AR255: 5, AR234: 5, AR061: 5, AR200: 5, AR294: 5, AR296: 4, AR188: 4, AR190: 4, AR182: 4, AR228: 4, AR269: 4, AR270: 4, AR232: 4, AR179: 4, AR227: 4, AR268: 4, |
| | | | | AR236: 4, AR254: 4, AR258: 4, AR260: 4, AR290: 4, AR267: 3, AR256: 3, H0616: 14, H0038: 12, H0618: 6, H0253: 5, L0758: 5, L0768: 4, H0411: 2, L0779: 2, H0747: 1, |
| | | | | L0151: 1, L0697: 1 and S0398: 1. |
| 160 | HTEBI28 | 462221 | 170 | AR055: 101, AR060: 80, AR299: 73, AR283: 71, AR089: 66, AR104: 65, AR039: 55, AR316: 54, AR185: 54, AR096: 52, AR277: 47, AR282: 47, AR219: 41, AR218: 33, |
| | | | | AR313: 29, AR207: 26, AR309: 26, AR240: 26, AR300: 24, AR263: 22, AR1295: 21, AR212: 21, AR308: 21, AR311: 20, AR264: 20, AR213: 19, AR252: 19, AR053: 17, |
| | | | | AR242: 17, AR245: 16, AR214: 16, AR192: 16, AR224: 16, AR223: 16, AR193: 16, AR165: 15, AR197: 15, AR164: 15, AR222: 15, AR162: 14, AR161: 14, AR312: 14, |
| | | | | AR163: 14, AR205: 14, AR246: 14, AR033: 14, AR166: 14, AR198: 13, AR271: 13, AR235: 12, AR253: 12, AR201: 12, AR216: 10, AR169: 10, AR272: 10, AR217: 10, |
| | | | | AR170: 9, AR177: 9, AR204: 9, AR275: 8, AR254: 8, AR168: 8, AR171: 8, AR215: 8, AR172: 8, AR225: 7, AR174: 7, AR274: 7, AR229: 7, AR250: 7, AR243: 7, AR196: 6, |
| | | | | AR261: 6, AR061: 6, AR230: 6, AR247: 6, AR236: 6, AR288: 6, AR295: 6, AR297: 6, AR180: 6, AR181: 5, AR286: 5, AR199: 5, AR221: 5, AR285: 4, AR231: 4, AR287: 4, |
| | | | | AR233: 4, AR293: 4, AR234: 4, AR179: 4, AR178: 4, AR226: 4, AR257: 3, AR191: 3, AR291: 3, AR227: 3, AR262: 3, AR266: 3, AR289: 3, AR294: 3, AR296: 3, AR239: 3, |
| | | | | AR175: 3, AR232: 3, AR228: 3, AR267: 3, AR211: 3, AR188: 3, AR270: 3, AR238: 2, AR200: 2, AR203: 2, AR269: 2, AR255: 2, AR237: 2, AR210: 2, AR268: 2, AR182: 2, |
| | | | | AR258: 2, AR173: 2, AR290: 2, AR189: 2, AR190: 1, AR256: 1, L0794: 3, H0038: 2, L0768: 2, L0767: 1, L0791: 1, L4501: 1, L0758: 1 and L0698: 1. |
| 161 | HTEHR24 | 835894 | 171 | AR161: 5, AR162: 5, AR163: 5, AR176: 5, AR180: 4, AR060: 3, AR055: 3, AR269: 3, AR300: 3, AR181: 3, AR228: 3, AR170: 3, AR166: 3, AR233: 3, AR257: 3, AR168: 3, |
| | | | | AR177: 3, AR165: 3, AR255: 3, AR164: 3, AR216: 3, AR172: 3, AR236: 2, AR201: 2, AR288: 2, AR271: 2, AR229: 2, AR200: 2, AR268: 2, AR225: 2, AR239: 2, AR178: 2, |
| | | | | AR266: 2, AR309: 2, AR179: 2, AR247: 2, AR234: 2, AR237: 2, AR286: 2, AR291: 2, AR282: 2, AR240: 2, AR290: 2, AR238: 2, AR182: 2, AR089: 2, AR270: 2, AR253: 2, |
| | | | | AR227: 2, AR207: 2, AR223: 2, AR287: 2, AR275: 2, AR297: 2, AR293: 2, AR174: 2, AR264: 2, AR294: 2, AR203: 2, AR193: 2, AR185: 2, AR235: 2, AR190: 2, AR231: 2, |
| | | | | AR175: 2, AR196: 2, AR261: 2, AR198: 2, AR104: 2, AR171: 2, AR262: 2, AR316: 2, AR195: 2, AR295: 2, AR311: 2, AR285: 2, AR061: 2, AR296: 2, AR222: 2, AR274: 2, |
| | | | | AR267: 2, AR189: 1, AR191: 1, AR312: 1, AR277: 1, AR283: 1, AR226: 1, AR214: 1, AR205: 1, AR299: 1, AR250: 1, AR217: 1, AR230: 1, AR308: 1, AR096: 1, AR183: 1, |
| | | | | AR289: 1, AR213: 1, AR204: 1, AR313: 1, AR173: 1, AR246: 1, AR272: 1, AR232: 1, L0766: 8, L0803: 6, L0758: 5, H0038: 4, L0805: 3, H0144: 3, L0743: 3, H0550: 2, |
| | | | | H0013: 2, H0457: 2, L0471: 2, H0616: 2, L0800: 2, L0794: 2, L0774: 2, L0776: 2, H0710: 2, H0521: 2, L0754: 2, L0745: 2, |
| | | | | H0341: 1, H0728: 1, H0735: 1, H0392: 1, H0069: 1, |
| | | | | H0635: 1, H0318: 1, H0581: 1, H0309: 1, H0012: 1, H0083: 1, H0179: 1, H0039: 1, S0036: 1, H0090: 1, S0440: 1, L0763: 1, L0761: 1, L0372: 1, L0662: 1, L0806: 1, L0807: 1, |
| | | | | L0659: 1, L5622: 1, L0788: 1, L0791: 1, L0793: 1, L0666: 1, S0428: 1, S0126: 1, S0027: 1, S0028: 1, L0740: 1, L0756: 1, L0752: 1, L0731: 1, L0588: 1, L0591: 1, S0026: 1, |
| | | | | S0242: 1, H0423: 1 and H0293: 1. |
| | HTEHR24 | 513039 | 280 | |
| 162 | HTEHU31 | 600394 | 172 | AR052: 91, AR249: 84, AR251: 80, AR186: 76, AR259: 66, AR055: 65, AR248: 65, AR218: 63, AR314: 62, AR033: 61, AR284: 59, AR061: 57, AR219: 56, AR310: 55, |
| | | | | AR185: 55, AR298: 55, AR273: 55, AR184: 54, AR292: 53, AR104: 53, AR290: 53, AR253: 51, AR280: 50, AR312: 49, AR270: 46, AR296: 46, AR313: 45, AR266: 45, |
| | | | | AR265: 44, AR315: 43, AR233: 42, AR175: 41, AR096: 41, AR213: 41, AR089: 40, AR247: 38, AR282: 38, AR267: 38, AR256: 38, AR300: 37, AR039: 37, AR269: 37, |
| | | | | AR183: 36, AR229: 36, AR309: 35, AR274: 34, AR289: 34, AR271: 32, AR227: 32, AR182: 32, AR299: 32, AR316: 30, AR281: 30, AR237: 29, AR241: 29, AR293: 28, |
| | | | | AR268: 27, AR243: 27, AR179: 26, AR283: 26, AR177: 26, AR206: 26, AR226: 26, AR291: 25, AR294: 25, AR053: 24, AR060: 24, AR232: 24, AR240: 22, AR231: 21, |
| | | | | AR194: 21, AR198: 20, AR234: 20, AR258: 20, AR244: 20, AR277: 19, AR192: 18, AR204: 18, AR285: 18, AR263: 17, AR295: 17, AR275: 16, AR286: 15, AR205: 14, |
| | | | | AR238: 14, AR202: 14, AR246: 12, AR178: 5, AR207: 5, AR170: 4, AR245: 3, AR297: 3, AR224: 2, AR239: 2, |
| | | | | AR201: 2, AR225: 2, AR272: 2, AR168: 2, AR252: 2, AR221: 2, |
| | | | | AR162: 2, AR176: 1, AR172: 1, AR163: 1, AR164: 1, AR214: 1, AR161: 1, AR288: 1, AR212: 1, AR188: 1, AR181: 1, AR222: 1, AR171: 1, AR287: 1, AR308: 1, AR193: 1, |
| | | | | AR311: 1, AR196: 1, L0748: 9, L0659: 3, S0358: 2, H0618: 2, H0616: 2, H0529: 2, L0770: 2, L0662: 2, L0794: 2, L0766: 2, L0775: 2, L0776: 2, L0740: 2, L0751: 2, L0752: 2, |
| | | | | L0758: 2, H0171: 1, S0114: 1, S0218: 1, S0116: 1, S0356: 1, H0575: 1, H0004: 1, H0012: 1, H0038: 1, H0625: 1, S0344: 1, L0769: 1, L0761: 1, L0771: 1, L0768: 1, L0649: 1, |
| | | | | L0805: 1, L0653: 1, L0647: 1, L0666: 1, L0665: 1, L0438: 1, S0292: 1, H0670: 1, L0750: 1, L0777: 1, L0780: 1, L0605: 1 and L0601: 1. |
| 163 | HTEHU93 | 722254 | 173 | AR184: 5, AR265: 4, AR263: 3, AR310: 2, AR254: 2, AR273: 2, AR244: 2, AR161: 2, AR163: 2, AR266: 2, AR217: 2, AR288: 2, AR225: 1, AR192: 1, AR264: 1, AR224: 1, |
| | | | | AR180: 1, AR284: 1, AR245: 1, AR162: 1, AR282: 1, AR257: 1, AR172: 1, AR298: 1, AR312: 1, AR181: 1, H0038: 3, L0758: 3, H0616: 1 and L0779: 1. |
| | HTEHU93 | 423009 | 281 | |
| 164 | HTEIP36 | 520468 | 174 | AR162: 8, AR161: 7, AR163: 7, AR235: 7, AR229: 6, AR183: 6, AR176: 6, AR173: 6, AR313: 5, AR178: 5, AR266: 5, AR309: 5, AR233: 5, AR165: 5, AR181: 5, AR257: 5, |
| | | | | AR164: 5, AR182: 5, AR274: 5, AR166: 4, AR221: 4, AR275: 4, AR175: 4, AR264: 4, AR300: 4, AR228: 4, AR268: 4, AR261: 4, AR096: 4, AR269: 4, AR293: 4, AR262: 4, |
| | | | | AR270: 4, AR267: 4, AR196: 4, AR089: 4, AR231: 4, AR291: 4, AR238: 4, AR177: 4, AR226: 4, AR247: 4, AR282: 3, AR255: 3, AR185: 3, AR239: 3, AR299: 3, AR234: 3, |
| | | | | AR237: 3, AR179: 3, AR277: 3, AR174: 3, AR289: 3, AR188: 3, AR258: 3, AR236: 3, AR199: 3, AR316: 3, AR225: 3, AR060: 3, AR290: 3, AR250: 3, AR227: 3, AR203: 3, |
| | | | | AR297: 3, AR191: 3, AR294: 3, AR285: 3, AR061: 3, AR218: 3, AR296: 3, AR230: 3, AR215: 3, AR217: 3, AR172: 3, AR055: 2, AR240: 2, AR286: 2, AR288: 2, AR287: 2, |
| | | | | AR295: 2, AR189: 2, AR224: 2, AR308: 2, AR223: 2, AR200: 2, AR263: 2, AR232: 2, AR214: 2, AR033: 2, AR190: 2, AR260: 2, AR272: 2, AR312: 2, AR104: 2, AR222: 2, |
| | | | | AR039: 2, AR171: 2, AR219: 2, AR212: 2, AR256: 2, AR311: 1, AR243: 1, AR213: 1, AR201: 1, AR195: 1, AR169: 1, AR211: 1, AR216: 1, H0038: 1 and H0616: 1. |
| 165 | HTEIV80 | 584798 | 175 | AR207: 18, AR192: 12, AR197: 11, AR198: 11, AR245: 11, AR201: 10, AR195: 9, AR039: 8, AR169: 8, AR193: 8, AR204: 8, AR224: 8, AR089: 7, AR205: 7, AR250: 7, |
| | | | | AR297: 7, AR253: 7, AR215: 7, AR214: 7, AR263: 7, AR223: 7, AR309: 7, AR172: 7, AR235: 7, AR295: 6, AR222: 6, AR053: 6, AR271: 6, AR181: 6, AR213: 6, AR174: 6, |
| | | | | AR246: 6, AR261: 6, AR177: 6, AR165: 6, AR264: 6, AR060: 6, AR164: 6, AR308: 6, AR266: 6, AR312: 6, AR196: 5, AR242: 5, AR243: 5, AR269: 5, AR236: 5, AR212: 5, |
| | | | | AR225: 5, AR217: 5, AR176: 5, AR316: 5, AR252: 5, AR288: 5, AR178: 5, AR161: 5, AR168: 5, AR162: 5, AR311: 5, AR163: 5, AR285: 5, AR171: 5, AR183: 5, AR287: 5, |
| | | | | AR096: 5, AR216: 5, AR233: 5, AR055: 5, AR277: 4, AR240: 4, AR237: 4, AR300: 4, AR299: 4, AR182: 4, AR179: 4, AR291: 4, AR191: 4, AR275: 4, AR247: 4, AR274: 4, |
| | | | | AR185: 4, AR199: 4, AR293: 4, AR239: 4, AR262: 4, AR234: 4, AR061: 4, AR230: 4, AR289: 4, AR033: 4, AR296: 4, AR254: 4, AR270: 4, AR267: 4, AR229: 4, AR231: 4, |
| | | | | AR313: 3, AR294: 3, AR286: 3, AR228: 3, AR175: 3, AR282: 3, AR221: 3, AR200: 3, AR255: 3, AR257: 3, AR226: 3, AR188: 3, AR203: 3, AR290: 3, AR104: 3, AR189: 3, |
| | | | | AR180: 3, AR238: 3, AR283: 3, AR173: 3, AR258: 3, AR166: 3, AR232: 3, AR210: 2, AR268: 2, AR260: 2, AR227: 2, AR219: 2, AR218: 2, AR211: 2, AR190: 2, AR272: 1, |
| | | | | AR170: 1, AR256: 1, H0038: 1 |
| 166 | HTEPG70 | 834931 | 176 | AR176: 9, AR282: 7, AR162: 7, AR161: 7, AR163: 7, AR055: 7, AR182: 7, AR060: 6, AR266: 6, AR253: 6, AR201: 6, AR228: 5, AR242: 5, AR269: 5, AR204: 5, AR198: 5, |
| | | | | AR268: 5, AR261: 5, AR233: 5, AR229: 5, AR267: 5, AR270: 5, AR263: 5, AR165: 5, AR166: 5, AR181: 5, AR214: 5, AR223: 4, AR246: 4, AR183: 4, AR164: 4, AR236: 4, |
| | | | | AR239: 4, AR309: 4, AR257: 4, AR283: 4, AR178: 4, AR275: 4, AR053: 4, AR289: 4, AR238: 4, AR177: 4, AR193: 4, AR185: 4, AR230: 4, AR089: 4, AR218: 4, AR277: 4, |
| | | | | AR179: 4, AR192: 4, AR264: 4, AR039: 4, AR237: 4, AR104: 4, AR316: 4, AR061: 4, AR243: 4, AR175: 4, AR300: 4, AR222: 4, AR240: 4, AR299: 4, AR231: 4, AR224: 3, |
| | | | | AR096: 3, AR312: 3, AR308: 3, AR173: 3, AR245: 3, AR212: 3, AR226: 3, AR196: 3, AR271: 3, AR286: 3, AR247: 3, AR274: 3, AR215: 3, AR255: 3, AR293: 3, AR288: 3, |
| | | | | AR174: 3, AR197: 3, AR191: 3, AR296: 3, AR207: 3, AR221: 3, AR262: 3, AR227: 3, AR287: 3, AR199: 3, AR190: 3, AR290: 3, AR180: 3, AR234: 3, AR311: 2, AR313: 2, |
| | | | | AR203: 2, AR291: 2, AR200: 2, AR272: 2, AR294: 2, AR232: 2, AR216: 2, AR188: 2, AR295: 2, AR258: 2, AR033: 2, AR260: 2, AR285: 2, AR189: 2, AR297: 2, AR171: 2, |
| | | | | AR205: 2, AR195: 2, AR219: 2, AR168: 2, AR210: 2, AR213: 1, AR256: 1, AR172: 1, AR211: 1, AR254: 1, AR235: 1, AR169: 1, H0616: 3, L0758: 3, L0717: 1, H0038: 1 and |
| | | | | L0779: 1. |
| 167 | HTHBG43 | 919911 | 177 | AR215: 6, AR225: 5, AR171: 3, AR170: 3, AR193: 3, AR180: 3, AR254: 3, AR169: 3, AR221: 2, AR243: 2, AR309: 2, AR164: 2, AR283: 2, AR222: 2, AR172: 2, AR176: 1, |
| | | | | AR224: 1, AR299: 1, AR290: 1, AR311: 1, AR242: 1, AR270: 1, AR216: 1, AR168: 1, AR196: 1, AR277: 1, L0485: 2, H0306: 1, H0063: 1, L0646: 1, L0794: 1, L0766: 1 and |
| | | | | H0134: 1. |
| | HTHBG43 | 906282 | 282 | |
| 168 | HTJMA95 | 706618 | 178 | AR182: 7, AR184: 5, AR194: 5, AR310: 4, AR206: 4, AR170: 4, AR284: 4, AR263: 3, AR223: 3, AR282: 3, AR265: 3, AR243: 3, AR183: 3, AR298: 3, AR202: 3, AR169: 3, |
| | | | | AR186: 3, AR309: 2, AR195: 2, AR292: 2, AR166: 2, AR268: 2, AR199: 2, AR270: 2, AR267: 2, AR162: 2, AR221: 2, AR201: 2, AR052: 2, AR266: 2, AR289: 2, AR178: 2, |
| | | | | AR269: 2, AR277: 2, AR248: 2, AR281: 2, AR286: 2, AR296: 2, AR291: 2, AR229: 2, AR308: 2, AR232: 2, AR283: 2, AR033: 2, AR316: 2, AR224: 2, AR290: 2, AR231: 2, |
| | | | | AR060: 2, AR238: 2, AR295: 2, AR053: 2, AR173: 2, AR253: 2, AR313: 2, AR272: 2, AR089: 2, AR244: 2, AR213: 1, AR300: 1, AR299: 1, AR312: 1, AR161: 1, AR204: 1, |
| | | | | AR212: 1, AR172: 1, AR198: 1, AR285: 1, AR061: 1, AR288: 1, AR293: 1, AR176: 1, AR275: 1, AR241: 1, AR163: 1, AR247: 1, AR174: 1, AR227: 1, AR216: 1, AR254: 1, |
| | | | | AR240: 1, AR096: 1, AR294: 1, AR314: 1, AR191: 1, AR175: 1, AR235: 1, AR226: 1, AR237: 1, AR225: 1, AR258: 1, AR259: 1, H0264: 4, H0488: 4, S0328: 3, S0306: 2, |
| | | | | S0476: 1, H0272: 1, H0487: 1, H0494: 1, H0633: 1, L5623: 1, L2264: 1, L3665: 1 and S0330: 1. |
| 169 | HTLFE42 | 460583 | 179 | AR253: 5, AR221: 4, AR176: 4, AR222: 3, AR215: 3, AR299: 3, AR226: 3, AR257: 3, AR311: 3, AR033: 2, AR181: 2, AR291: 2, AR277: 2, AR295: 2, AR285: 2, AR161: 2, |
| | | | | AR313: 2, AR172: 2, AR262: 2, AR061: 1, AR162: 1, AR193: 1, AR163: 1, AR089: 1, AR173: 1, AR216: 1, AR283: 1, AR258: 1, AR224: 1, AR185: 1, L0794: 25, H0038: 4, |
| | | | | L0758: 3, L0768: 2, H0253: 1, H0050: 1, L0789: 1, L0790: 1 and S0380: 1. |
| 170 | HTLIT32 | 833906 | 180 | AR171: 7, AR176: 6, AR060: 5, AR055: 5, AR163: 5, AR162: 5, AR161: 5, AR165: 4, AR182: 4, AR164: 4, AR269: 4, AR266: 4, AR263: 4, AR166: 4, AR291: 4, AR235: 4, |
| | | | | AR181: 4, AR180: 4, AR214: 4, AR233: 4, AR271: 3, AR267: 3, AR275: 3, AR183: 3, AR228: 3, AR236: 3, AR268: 3, AR264: 3, AR270: 3, AR277: 3, AR255: 3, AR261: 3, |
| | | | | AR173: 3, AR237: 3, AR191: 3, AR257: 3, AR178: 3, AR061: 3, AR300: 3, AR229: 3, AR177: 3, AR169: 3, AR225: 3, AR290: 3, AR288: 3, AR289: 3, AR240: 3, AR223: 3, |
| | | | | AR179: 3, AR299: 3, AR089: 3, AR262: 3, AR242: 3, AR218: 3, AR185: 3, AR216: 3, AR104: 3, AR250: 3, AR201: 3, AR175: 3, AR311: 3, AR238: 3, AR188: 3, AR231: 3, |
| | | | | AR295: 2, AR260: 2, AR172: 2, AR230: 2, AR282: 2, AR308: 2, AR174: 2, AR274: 2, AR316: 2, AR198: 2, AR239: 2, AR283: 2, AR294: 2, AR096: 2, AR286: 2, AR193: 2, |
| | | | | AR285: 2, AR293: 2, AR207: 2, AR234: 2, AR297: 2, AR200: 2, AR287: 2, AR226: 2, AR196: 2, AR309: 2, AR190: 2, AR227: 2, AR203: 2, AR296: 2, AR217: 2, AR033: 2, |
| | | | | AR168: 2, AR312: 2, AR247: 2, AR195: 2, AR189: 1, AR224: 1, AR222: 1, AR199: 1, AR258: 1, AR219: 1, AR039: 1, AR232: 1, AR313: 1, AR256: 1, AR221: 1, L0758: 5, |
| | | | | L0779: 4, H0618: 3, H0038: 1, L0768: 1 and L0794: 1. |
| 171 | HTLIV19 | 1046341 | 181 | AR313: 57, AR039: 49, AR089: 39, AR299: 34, AR277: 31, AR185: 28, AR096: 28, AR300: 28, AR240: 27, AR316: 25, AR218: 23, AR104: 23, AR060: 21, AR219: 20, |
| | | | | AR055: 17, AR282: 17, AR283: 12, H0618: 1 |
| 172 | HTOAK16 | 560744 | 182 | AR219: 41, AR218: 38, AR096: 21, AR316: 19, AR089: 18, AR313: 16, AR060: 12, AR104: 11, AR039: 11, AR282: 10, AR299: 9, AR240: 9, AR264: 9, AR055: 8, AR252: 7, |
| | | | | AR185: 7, AR263: 7, AR300: 7, AR225: 7, AR309: 6, AR162: 6, AR254: 6, AR193: 6, AR161: 6, AR217: 5, AR283: 5, AR163: 5, AR277: 5, AR308: 5, AR176: 5, AR270: 4, |
| | | | | AR269: 4, AR229: 4, AR182: 4, AR228: 4, AR224: 4, AR183: 4, AR275: 4, AR223: 4, AR267: 4, AR237: 4, AR266: 4, AR177: 4, AR171: 4, AR291: 4, AR165: 4, AR181: 4, |
| | | | | AR238: 4, AR178: 4, AR312: 4, AR261: 4, AR247: 4, AR164: 3, AR268: 3, AR173: 3, AR272: 3, AR233: 3, AR216: 3, AR166: 3, AR231: 3, AR297: 3, AR200: 3, AR293: 3, |
| | | | | AR175: 3, AR196: 3, AR226: 3, AR236: 3, AR295: 3, AR246: 3, AR221: 3, AR230: 3, AR296: 3, AR199: 3, AR290: 3, AR274: 3, AR289: 3, AR214: 3, AR255: 3, AR239: 3, |
| | | | | AR311: 3, AR189: 3, AR234: 3, AR285: 3, AR257: 3, AR286: 3, AR288: 3, AR174: 3, AR195: 3, AR262: 2, AR190: 2, AR179: 2, AR287: 2, AR168: 2, AR191: 2, AR294: 2, |
| | | | | AR188: 2, AR172: 2, AR201: 2, AR227: 2, AR170: 2, AR203: 2, AR211: 2, AR061: 2, AR198: 2, AR258: 2, AR232: 2, AR180: 2, AR256: 1, AR222: 1, AR271: 1, AR260: 1, |
| | | | | AR033: 1, H0587: 1, L3816: 1, H0599: 1, H0052: 1, H0264: 1 and L0748: 1. |
| 173 | HTOHD42 | 604983 | 183 | AR283: 13, AR055: 11, AR277: 11, AR104: 9, AR089: 9, AR316: 8, AR096: 8, AR299: 8, AR039: 8, AR060: 8, AR240: 7, |
| | | | | AR313: 7, AR161: 7, AR162: 7, AR192: 7, AR253: 7, |
| | | | | AR252: 7, AR165: 7, AR164: 7, AR163: 7, AR198: 7, AR207: 7, AR282: 7, AR309: 7, AR166: 7, AR204: 7, AR300: 6, AR180: 6, AR197: 6, AR195: 6, AR250: 6, AR053: 6, |
| | | | | AR201: 6, AR185: 6, AR193: 6, AR176: 6, AR219: 6, AR218: 6, AR183: 5, AR242: 5, AR196: 5, AR245: 5, AR263: 5, AR264: 5, AR216: 5, AR213: 5, AR246: 5, AR261: 5, |
| | | | | AR171: 5, AR182: 5, AR229: 5, AR312: 5, AR262: 5, AR266: 5, AR221: 5, AR291: 5, AR257: 5, AR247: 5, AR308: 4, AR311: 4, AR293: 4, AR177: 4, AR212: 4, AR236: 4, |
| | | | | AR296: 4, AR181: 4, AR033: 4, AR222: 4, AR168: 4, AR175: 4, AR275: 4, AR178: 4, AR271: 4, AR295: 4, AR225: 4, AR170: 4, AR297: 4, AR289: 4, AR230: 4, AR226: 4, |
| | | | | AR288: 4, AR224: 4, AR269: 4, AR254: 4, AR205: 4, AR270: 4, AR228: 4, AR285: 4, AR287: 4, AR286: 4, AR191: 3, AR274: 3, AR243: 3, AR272: 3, AR233: 3, AR238: 3, |
| | | | | AR231: 3, AR294: 3, AR200: 3, AR268: 3, AR267: 3, AR179: 3, AR214: 3, AR239: 3, AR174: 3, AR237: 3, AR199: 3, AR234: 3, AR227: 3, AR217: 3, AR223: 3, AR203: 3, |
| | | | | AR232: 3, AR290: 3, AR061: 2, AR189: 2, AR255: 2, AR188: 2, AR258: 2, AR173: 2, AR172: 2, AR190: 2, AR235: 1, AR169: 1, AR210: 1, AR215: 1, H0264: 1 |
| 174 | HTOHM15 | 1028538 | 184 | AR282: 4, AR253: 3, AR242: 3, AR235: 3, AR222: 2, AR266: 2, AR224: 2, AR171: 2, AR216: 2, AR295: 2, AR271: 2, AR270: 2, AR182: 1, AR089: 1, AR183: 1, AR257: 1, |
| | | | | AR283: 1, AR217: 1, AR193: 1, AR285: 1, AR272: 1, AR277: 1, L0748: 12, L0749: 8, L0742: 7, L0747: 7, L0759: 6, L0769: 5, L0766: 5, |
| | | | | L0776: 5, L0754: 5, L0439: 4, L0740: 4, |
| | | | | L0750: 4, H0556: 3, T0006: 3, H0181: 3, H0617: 3, L0770: 3, L0774: 3, L0653: 3, L0438: 3, H0547: 3, L0779: 3, L0777: 3, L0731: 3, L0757: 3, L0758: 3, L0589: 3, L0591: 3, |
| | | | | S0360: 2, S0132: 2, H0009: 2, H0024: 2, H0264: 2, H0056: 2, L0638: 2, L0771: 2, L0775: 2, L0806: 2, L0666: 2, L0665: 2, H0436: 2, L0744: 2, L0751: 2, L0753: 2, L0596: 2, |
| | | | | L0599: 2, S0194: 2, S0218: 1, H0656: 1, S0116: 1, H0580: 1, H0208: 1, S0045: 1, H0411: 1, S6016: 1, H0587: 1, H0486: 1, H0706: 1, H0618: 1, H0253: 1, H0085: 1, T0110: 1, |
| | | | | H0232: 1, S0051: 1, S0022: 1, H0252: 1, H0428: 1, H0644: 1, H0169: 1, H0674: 1, L0455: 1, H0598: 1, H0038: 1, H0087: 1, H0433: 1, S0038: 1, T0042: 1, S0210: 1, S0002: 1, |
| | | | | L0639: 1, L0772: 1, L0372: 1, L0643: 1, L0662: 1, L0768: 1, L0375: 1, L0651: 1, L0629: 1, L0518: 1, L0383: 1, L0545: 1, L0528: 1, L0647: 1, L0663: 1, S0126: 1, H0435: 1, |
| | | | | S0330: 1, H0521: 1, S0406: 1, S3012: 1, S3014: 1, S0027: 1, L0601: 1, H0422: 1 and H0352: 1. |
| | HTOHM15 | 848199 | 283 | |
| | HTOHM15 | 848200 | 284 | |
| | HTOHM15 | 848196 | 285 | |
| 175 | HTPBW79 | 1317835 | 185 | AR055: 85, AR060: 59, AR039: 42, AR104: 41, AR299: 38, AR089: 38, AR283: 37, AR096: 31, AR185: 28, AR316: 27, AR282: 27, AR219: 20, AR218: 19, AR300: 19, |
| | | | | AR240: 19, AR277: 18, AR215: 15, AR225: 15, AR313: 14, AR214: 11, AR217: 11, AR268: 11, AR165: 10, AR164: 10, |
| | | | | AR166: 10, AR269: 9, AR216: 9, AR223: 9, AR183: 8, |
| | | | | AR266: 8, AR182: 8, AR245: 7, AR221: 7, AR270: 7, AR176: 7, AR224: 6, AR061: 6, AR267: 6, AR168: 6, AR171: 6, AR177: 6, AR222: 6, AR272: 6, AR247: 6, AR173: 6, |
| | | | | AR175: 6, AR290: 6, AR239: 5, AR172: 5, AR291: 5, AR191: 5, AR178: 5, AR246: 5, AR243: 5, AR188: 5, AR201: 5, AR237: 5, AR271: 5, AR211: 5, AR275: 5, AR195: 5, |
| | | | | AR229: 5, AR289: 5, AR238: 5, AR181: 5, AR257: 5, AR161: 4, AR162: 4, AR180: 4, AR170: 4, AR200: 4, AR228: 4, AR163: 4, AR236: 4, AR233: 4, AR297: 4, AR285: 4, |
| | | | | AR309: 4, AR231: 4, AR294: 4, AR204: 4, AR205: 4, AR242: 4, AR232: 4, AR296: 4, AR286: 4, AR179: 4, AR190: 4, AR252: 4, AR308: 4, AR234: 4, AR193: 4, AR197: 4, |
| | | | | AR288: 4, AR293: 3, AR262: 3, AR189: 3, AR287: 3, AR199: 3, AR255: 3, AR174: 3, AR226: 3, AR212: 3, AR260: 3, AR198: 3, AR295: 3, AR312: 3, AR261: 3, AR033: 3, |
| | | | | AR196: 3, AR254: 3, AR192: 3, AR258: 3, AR230: 3, AR227: 3, AR207: 3, AR203: 3, AR210: 3, AR256: 2, AR235: 2, AR274: 2, AR264: 2, AR053: 2, AR213: 1, AR169: 1, |
| | | | | AR250: 1, L0747: 7, H0618: 6, H0253: 5, H0135: 4, S0046: 3, H0620: 3, S0344: 3, L0809: 3, H0556: 2, S0354: 2, S0358: 2, S0278: 2, H0370: 2, H0392: 2, H0046: 2, T0010: 2, |
| | | | | H0083: 2, H0188: 2, H0039: 2, S0144: 2, L0438: 2, L3811: 2, H0670: 2, S0152: 2, H0521: 2, L0439: 2, L0758: 2, H0445: 2, L0581: 2, S0276: 2, H0713: 1, H0656: 1, H0176: 1, |
| | | | | H0638: 1, S0418: 1, S0356: 1, S0360: 1, S0045: 1, S0476: 1, H0619: 1, H0550: 1, H0333: 1, H0427: 1, S0280: 1, H0318: 1, S0474: 1, H0052: 1, H0327: 1, H0041: 1, H0009: 1, |
| | | | | H0572: 1, H0566: 1, H0123: 1, H0050: 1, H0024: 1, H0510: 1, S6028: 1, H0266: 1, H0428: 1, T0006: 1, H0213: 1, H0606: 1, H0124: 1, |
| | | | | H0038: 1, H0087: 1, H0551: 1, H0059: 1, |
| | | | | H0100: 1, H0494: 1, S0142: 1, S0426: 1, H0529: 1, L0769: 1, L3905: 1, L0373: 1, L0374: 1, L0804: 1, L0774: 1, L0659: 1, L0528: 1, L0666: 1, L3391: 1, L2262: 1, H0144: 1, |
| | | | | S0126: 1, H0435: 1, H0659: 1, H0539: 1, H0187: 1, H0478: 1, S0027: 1, S0028: 1, L0743: 1, L0748: 1, L0752: 1, S0434: 1, L0596: 1, |
| | | | | L0603: 1, H0422: 1, S0424: 1 and H0352: 1. |
| | HTPBW79 | 581435 | 286 | |
| | HTPBW79 | 396459 | 287 | |
| 176 | HTTDB46 | 812763 | 186 | AR197: 5, AR161: 4, AR181: 4, AR215: 4, AR163: 4, AR162: 4, AR165: 4, AR272: 4, AR164: 3, AR282: 3, AR176: 3, AR264: 3, AR166: 3, AR180: 3, AR178: 3, AR311: 3, |
| | | | | AR192: 3, AR263: 3, AR236: 3, AR174: 3, AR261: 3, AR195: 3, AR207: 3, AR288: 3, AR228: 3, AR222: 3, AR299: 3, AR193: 3, AR201: 3, AR309: 3, AR257: 3, AR212: 2, |
| | | | | AR221: 2, AR205: 2, AR224: 2, AR053: 2, AR271: 2, AR275: 2, AR204: 2, AR239: 2, AR308: 2, AR291: 2, AR235: 2, AR214: 2, AR173: 2, AR190: 2, AR287: 2, AR177: 2, |
| | | | | AR196: 2, AR216: 2, AR191: 2, AR225: 2, AR266: 2, AR169: 2, AR262: 2, AR245: 2, AR232: 2, AR289: 2, AR249: 2, AR269: 2, AR185: 2, AR268: 2, AR285: 2, AR229: 2, |
| | | | | AR226: 2, AR238: 2, AR237: 2, AR183: 2, AR179: 2, AR247: 2, AR255: 2, AR188: 2, AR313: 2, AR312: 2, AR233: 2, AR295: 2, AR270: 2, AR189: 2, AR253: 2, AR175: 2, |
| | | | | AR294: 2, AR060: 2, AR231: 2, AR089: 2, AR296: 2, AR246: 2, AR213: 2, AR297: 2, AR168: 2, AR234: 2, AR198: 2, AR223: 2, AR273: 2, AR267: 2, AR293: 1, AR039: 1, |
| | | | | AR227: 1, AR274: 1, AR217: 1, AR277: 1, AR240: 1, AR203: 1, AR290: 1, AR316: 1, AR061: 1, AR286: 1, AR300: 1, AR242: 1, AR230: 1, AR200: 1, AR182: 1, AR171: 1, |
| | | | | AR243: 1, AR310: 1, AR033: 1, AR096: 1, AR258: 1, S0408: 4, H0036: 3, S0444: 2, S0360: 1, H0038: 1 and H0040: 1. |
| | HTTDB46 | 909573 | 288 | |
| 177 | HTXCV12 | 1352213 | 187 | AR282: 6, AR162: 4, AR161: 4, AR163: 4, AR053: 4, AR176: 4, AR264: 3, AR217: 3, AR214: 3, AR250: 3, AR168: 3, AR182: 3, AR172: 3, AR266: 3, AR274: 3, AR269: 3, |
| | | | | AR270: 3, AR225: 3, AR165: 3, AR213: 3, AR235: 3, AR178: 3, AR164: 3, AR257: 3, AR309: 3, AR166: 3, AR228: 3, AR267: 3, AR216: 3, AR268: 3, AR221: 2, AR175: 2, |
| | | | | AR294: 2, AR210: 2, AR240: 2, AR179: 2, AR089: 2, AR177: 2, AR290: 2, AR171: 2, AR291: 2, AR262: 2, AR255: 2, AR247: 2, AR288: 2, AR233: 2, AR237: 2, AR283: 2, |
| | | | | AR263: 2, AR239: 2, AR238: 2, AR316: 2, AR191: 2, AR275: 2, AR236: 2, AR193: 2, AR229: 2, AR185: 2, AR060: 2, AR296: 2, AR183: 2, AR261: 2, AR200: 2, AR277: 2, |
| | | | | AR234: 2, AR055: 2, AR226: 2, AR188: 2, AR313: 2, AR174: 2, AR222: 2, AR170: 2, AR272: 2, AR196: 2, AR096: 2, AR295: 2, AR289: 2, AR293: 2, AR231: 1, AR181: 1, |
| | | | | AR311: 1, AR299: 1, AR227: 1, AR300: 1, AR312: 1, AR173: 1, AR061: 1, AR203: 1, AR195: 1, AR201: 1, AR260: 1, AR286: 1, AR287: 1, AR224: 1, L0766: 16, L0743: 11, |
| | | | | H0692: 8, L0769: 7, L0518: 6, L0748: 6, L0771: 4, L0745: 4, L0779: 4, H0265: 3, S0358: 3, H0494: 3, L0755: 3, H0550: 2, H0486: 2, H0581: 2, H0135: 2, L0761: 2, L0804: 2, |
| | | | | L0774: 2, L0438: 2, L0777: 2, H0685: 1, S0114: 1, H0583: 1, L3814: 1, S0116: 1, S0212: 1, H0254: 1, S0408: 1, S0476: 1, T0104: 1, H0586: 1, H0587: 1, H0331: 1, T0109: 1, |
| | | | | H0599: 1, L0738: 1, H0150: 1, H0012: 1, H0264: 1, S0438: 1, L0770: 1, L0374: 1, L0764: 1, L0768: 1, L0803: 1, L0653: 1, L0776: 1, L0788: 1, L0792: 1, L0663: 1, S0428: 1, |
| | | | | S0053: 1, S0216: 1, H0783: 1, L3811: 1, S0152: 1, H0522: 1, H0555: 1, S0432: 1, L0744: 1, L0751: 1, L0749: 1, L0756: 1, L0758: 1, S0436: 1, L0601: 1, H0543: 1, H0423: 1, |
| | | | | S0424: 1 and H0506: 1. |
| | HTXCV12 | 567006 | 289 | |
| 178 | HTXDW56 | 695765 | 188 | AR215: 23, AR248: 19, AR216: 19, AR217: 16, AR244: 15, AR186: 14, AR170: 14, AR197: 14, AR052: 14, AR096: 13, AR254: 13, AR104: 13, AR280: 13, AR273: 13, |
| | | | | AR315: 12, AR282: 12, AR180: 12, AR250: 12, AR240: 12, AR161: 11, AR162: 11, AR238: 11, AR163: 11, AR214: 11, AR225: 11, AR164: 11, AR249: 11, AR246: 11, |
| | | | | AR060: 11, AR165: 11, AR196: 11, AR221: 11, AR296: 11, AR089: 11, AR316: 10, AR310: 10, AR292: 10, AR314: 10, AR176: 10, AR166: 10, AR224: 10, AR055: 10, |
| | | | | AR309: 10, AR261: 10, AR178: 10, AR255: 10, AR183: 9, AR271: 9, AR257: 9, AR313: 9, AR283: 9, AR288: 9, AR039: 9, |
| | | | | AR198: 9, AR171: 9, AR291: 9, AR266: 9, AR195: 9, |
| | | | | AR243: 9, AR275: 9, AR181: 9, AR218: 9, AR312: 9, AR268: 8, AR192: 8, AR293: 8, AR173: 8, AR247: 8, AR172: 8, AR194: 8, AR245: 8, AR269: 8, AR256: 8, AR219: 8, |
| | | | | AR185: 8, AR033: 8, AR213: 8, AR189: 8, AR206: 8, AR201: 8, AR289: 8, AR253: 8, AR297: 8, AR174: 8, AR053: 8, AR200: 8, AR169: 8, AR061: 8, AR270: 8, AR175: 7, |
| | | | | AR231: 7, AR190: 7, AR295: 7, AR237: 7, AR211: 7, AR274: 7, AR193: 7, AR188: 7, AR223: 7, AR222: 7, AR299: 7, AR262: 7, AR204: 7, AR300: 7, AR202: 7, AR205: 7, |
| | | | | AR210: 6, AR272: 6, AR264: 6, AR191: 6, AR265: 6, AR294: 6, AR287: 6, AR199: 6, AR168: 6, AR277: 6, AR229: 6, AR239: 6, AR177: 6, AR226: 5, AR232: 5, AR263: 5, |
| | | | | AR259: 5, AR179: 5, AR267: 5, AR241: 5, AR258: 5, AR234: 5, AR203: 5, AR251: 5, AR308: 5, AR182: 5, AR290: 5, AR228: 5, AR311: 5, AR286: 5, AR212: 5, AR260: 4, |
| | | | | AR235: 4, AR207: 4, AR233: 4, AR285: 4, AR284: 4, AR236: 4, AR242: 4, AR184: 3, AR227: 3, AR298: 3, AR230: 2, AR281: 2, AR252: 1, S0474: 17, L0803: 16, L0748: 13, |
| | | | | S0408: 11, L2669: 11, L2504: 10, L0770: 10, L0805: 9, L0754: 9, S0422: 8, L0809: 7, S0360: 5, L0794: 5, L0755: 5, L0731: 5, L0758: 5, |
| | | | | H0265: 4, S0414: 4, H0581: 4, H0046: 4, |
| | | | | H0009: 4, H0271: 4, L0771: 4, L0439: 4, L0749: 4, L0591: 4, H0556: 3, H0327: 3, H0266: 3, L0804: 3, L0776: 3, L0666: 3, H0521: 3, H0522: 3, S0434: 3, S0436: 3, S0412: 3, |
| | | | | S0114: 2, S0116: 2, S0212: 2, H0661: 2, S0358: 2, S0132: 2, L3388: 2, S0278: 2, H0586: 2, H0069: 2, H0123: 2, H0622: 2, H0031: 2, H0644: 2, H0616: 2, H0551: 2, L0598: 2, |
| | | | | L0766: 2, L0655: 2, L0659: 2, L0636: 2, L0664: 2, L0665: 2, H0144: 2, S0374: 2, H0547: 2, H0660: 2, S0378: 2, H0436: 2, L0750: 2, L0756: 2, H0624: 1, S0040: 1, H0295: 1, |
| | | | | S0134: 1, H0656: 1, L2904: 1, H0484: 1, S0356: 1, S0442: 1, S0376: 1, S0444: 1, H0580: 1, H0730: 1, H0741: 1, H0208: 1, S0045: 1, S0476: 1, H0393: 1, H0351: 1, H0431: 1, |
| | | | | H0370: 1, H0642: 1, H0485: 1, L3499: 1, H0635: 1, H0427: 1, H0156: 1, L0021: 1, H0042: 1, T0082: 1, S0010: 1, H0251: 1, L0040: 1, |
| | | | | H0545: 1, H0457: 1, H0024: 1, H0051: 1, |
| | | | | H0083: 1, H0061: 1, S0316: 1, H0687: 1, S0003: 1, H0688: 1, H0039: 1, H0617: 1, H0038: 1, H0040: 1, H0264: 1, H0100: 1, H0494: 1, H0561: 1, S0440: 1, L2270: 1, S0002: 1, |
| | | | | S0426: 1, H0529: 1, L0763: 1, L0638: 1, L0637: 1, L0761: 1, L0373: 1, L0800: 1, L0764: 1, L0662: 1, L0626: 1, L0650: 1, L0806: 1, L0653: 1, L0661: 1, L0515: 1, L5622: 1, |
| | | | | L0789: 1, L0663: 1, L2653: 1, L2257: 1, L2259: 1, L2261: 1, L2654: 1, L0565: 1, H0519: 1, H0435: 1, H0658: 1, S0328: 1, S0330: 1, S0380: 1, H0710: 1, H0696: 1, S0044: 1, |
| | | | | S0027: 1, L0742: 1, L0744: 1, L0751: 1, L0745: 1, L0747: 1, L0780: 1, L0752: 1, L0757: 1, L0759: 1, L0596: 1, L0605: 1, L0595: 1, S0026: 1, S0192: 1, H0542: 1, H0543: 1, |
| | | | | S0042: 1 and S0462: 1. |
| 179 | HTXFL30 | 620001 | 189 | AR271: 4, AR171: 4, AR221: 3, AR181: 3, AR180: 3, AR269: 3, AR243: 3, AR253: 3, AR223: 3, AR224: 3, AR162: 2, AR163: 2, AR245: 2, AR161: 2, AR178: 2, AR168: 2, |
| | | | | AR215: 2, AR246: 2, AR291: 2, AR192: 2, AR193: 1, AR257: 1, AR295: 1, AR263: 1, AR216: 1, AR272: 1, AR293: 1, AR175: 1, AR290: 1, AR236: 1, AR312: 1, AR225: 1, |
| | | | | AR173: 1, AR172: 1, AR267: 1, AR300: 1, H0038: 2, H0265: 1, H0556: 1, S0134: 1, S0222: 1, L0455: 1, L0792: 1, S0152: 1, S0028: 1 and L0591: 1. |
| 180 | HTXKP61 | 824083 | 190 | AR308: 26, AR250: 23, AR312: 22, AR254: 21, AR104: 21, AR271: 20, AR243: 20, AR311: 17, AR253: 17, AR264: 16, AR053: 14, AR309: 13, AR161: 13, AR162: 13, |
| | | | | AR272: 13, AR163: 13, AR165: 13, AR173: 13, AR212: 12, AR275: 12, AR164: 12, AR283: 12, AR166: 12, AR245: 11, AR089: 11, AR185: 11, AR197: 11, AR246: 11, |
| | | | | AR205: 11, AR039: 10, AR198: 10, AR213: 9, AR242: 9, AR274: 9, AR313: 9, AR217: 9, AR176: 9, AR263: 8, AR096: 8, AR171: 8, |
| | | | | AR033: 7, AR247: 7, AR240: 7, AR270: 7, |
| | | | | AR204: 7, AR192: 7, AR316: 7, AR207: 6, AR195: 6, AR060: 6, AR282: 6, AR193: 6, AR177: 5, AR269: 5, AR181: 5, AR172: 5, AR175: 5, AR238: 5, AR169: 5, AR210: 5, |
| | | | | AR180: 5, AR201: 5, AR252: 5, AR299: 5, AR300: 5, AR061: 5, AR221: 4, AR055: 4, AR223: 4, AR268: 4, AR174: 4, AR218: 4, AR178: 4, AR222: 4, AR182: 4, AR226: 3, |
| | | | | AR183: 3, AR266: 3, AR170: 3, AR229: 3, AR277: 3, AR234: 3, AR225: 3, AR219: 3, AR179: 3, AR224: 3, AR168: 3, AR291: 3, AR290: 3, AR231: 3, AR267: 3, AR286: 2, |
| | | | | AR239: 2, AR261: 2, AR233: 2, AR257: 2, AR288: 2, AR188: 2, AR255: 2, AR215: 2, AR289: 2, AR216: 2, AR196: 2, AR236: 2, AR237: 2, AR285: 2, AR211: 2, AR297: 2, |
| | | | | AR191: 2, AR258: 2, AR293: 2, AR287: 2, AR295: 2, AR232: 2, AR294: 2, AR189: 2, AR228: 2, AR260: 2, AR256: 1, AR262: 1, AR296: 1, AR203: 1, L0439: 12, L0766: 9, |
| | | | | L0438: 9, L0794: 8, H0052: 4, L0769: 4, L0662: 4, L0776: 4, H0547: 4, H0422: 4, H0556: 3, H0620: 3, H0617: 3, L0809: 3, L0748: 3, L0777: 3, L0752: 3, L0758: 3, H0419: 2, |
| | | | | L0717: 2, H0586: 2, H0581: 2, T0010: 2, H0688: 2, H0087: 2, L0800: 2, L0803: 2, L0805: 2, L0512: 2, L0789: 2, L0663: 2, L0665: 2, L0741: 2, L0747: 2, L0750: 2, L0731: 2, |
| | | | | L0757: 2, L0759: 2, H0624: 1, H0717: 1, T0049: 1, H0657: 1, S0418: 1, S0358: 1, S0444: 1, S0360: 1, S0045: 1, S6026: 1, H0411: 1, S0222: 1, H0441: 1, H0497: 1, H0486: 1, |
| | | | | H0098: 1, H0253: 1, L0163: 1, H0033: 1, H0606: 1, H0673: 1, L0455: 1, H0135: 1, H0038: 1, H0063: 1, H0379: 1, H0264: 1, H0413: 1, |
| | | | | S0210: 1, L0763: 1, L0638: 1, L0374: 1, |
| | | | | L0764: 1, L0387: 1, L0650: 1, L0774: 1, L0657: 1, L0659: 1, L0791: 1, L0793: 1, L0666: 1, H0690: 1, H0660: 1, H0672: 1, H0696: 1, L0612: 1, S0027: 1, S0028: 1, S0032: 1, |
| | | | | L0742: 1, L0756: 1, L0779: 1, L0592: 1, L0608: 1, L0361: 1, L0601: 1, H0653: 1, H0543: 1, H0423: 1 and L0600: 1. |
| 181 | HUKAH51 | 1352424 | 191 | AR039: 323, AR104: 317, AR055: 287, AR060: 230, AR185: 220, AR089: 214, AR300: 199, AR282: 174, AR240: 174, AR316: 160, AR096: 135, AR277: 128, AR299: 121, |
| | | | | AR283: 108, AR219: 95, AR218: 82, AR313: 81, S0410: 26, L0777: 13, S0444: 6, L0439: 5, L0731: 5, S0358: 4, S0440: 4, L0766: 4, L0748: 4, L0758: 4, H0661: 3, S0442: 3, |
| | | | | S0408: 3, H0393: 3, H0574: 3, H0038: 3, H0616: 3, S0438: 3, H0509: 3, L0794: 3, L0438: 3, S0406: 3, L0779: 3, S0360: 2, H0050: 2, H0510: 2, H0266: 2, S0003: 2, H0032: 2, |
| | | | | H0040: 2, H0634: 2, L0764: 2, L0655: 2, S0374: 2, L0588: 2, H0624: 1, H0171: 1, S6024: 1, S0134: 1, S0001: 1, H0742: 1, H0730: 1, H0722: 1, H0411: 1, H0331: 1, H0485: 1, |
| | | | | H0486: 1, H0575: 1, H0204: 1, T0115: 1, H0150: 1, H0014: 1, H0083: 1, S0214: 1, H0615: 1, H0169: 1, H0124: 1, H0598: 1, H0059: 1, H0646: 1, |
| | | | | H0529: 1, L0772: 1, L0648: 1, |
| | | | | L0649: 1, L0803: 1, L0774: 1, L0805: 1, L0809: 1, L0791: 1, S0052: 1, H0144: 1, H0659: 1, S0328: 1, S0330: 1, S0146: 1, H0478: 1, S0026: 1 and H0423: 1. |
| | HUKAH51 | 1300737 | 290 | |
| | HUKAH51 | 603538 | 291 | |
| 182 | HUKBT29 | 694590 | 192 | AR180: 4, AR172: 3, AR225: 3, AR271: 2, AR242: 2, AR170: 2, AR221: 2, AR275: 2, AR183: 2, AR283: 2, AR181: 2, AR264: 2, AR214: 2, AR213: 2, AR257: 1, AR277: 1, |
| | | | | AR195: 1, AR171: 1, AR205: 1, AR222: 1, AR261: 1, AR164: 1, AR176: 1, S0366: 3, H0599: 2, H0059: 2, H0547: 2, L0604: 2, H0543: 2, H0149: 1, L0460: 1, S0430: 1, |
| | | | | H0255: 1, H0728: 1, H0002: 1, H0051: 1, S0364: 1, H0116: 1, L5575: 1, L0794: 1, L0803: 1, S0428: 1, S0330: 1, H0522: 1, H0555: 1, |
| | | | | L0747: 1, L0777: 1, L0485: 1, L0366: 1 and |
| | | | | S0446: 1. |
| 183 | HUSBA88 | 895435 | 193 | AR251: 27, AR250: 24, AR273: 24, AR264: 23, AR243: 22, AR263: 21, AR253: 20, AR245: 18, AR265: 17, AR309: 17, AR254: 16, AR312: 15, AR310: 14, AR240: 13, |
| | | | | AR308: 12, AR213: 11, AR212: 11, AR275: 11, AR180: 10, AR096: 10, AR242: 10, AR053: 10, AR162: 10, AR052: 10, AR161: 10, |
| | | | | AR268: 10, AR163: 9, AR197: 9, AR313: 9, |
| | | | | AR272: 9, AR165: 8, AR248: 8, AR164: 8, AR271: 8, AR274: 8, AR247: 8, AR290: 8, AR249: 8, AR311: 8, AR166: 8, AR246: 8, AR195: 7, AR299: 7, AR089: 7, AR200: 7, |
| | | | | AR270: 7, AR193: 7, AR241: 7, AR183: 7, AR176: 7, AR199: 7, AR282: 7, AR201: 7, AR196: 7, AR190: 7, AR178: 6, AR198: 6, AR300: 6, AR175: 6, AR189: 6, AR191: 6, |
| | | | | AR316: 6, AR266: 6, AR192: 6, AR207: 6, AR267: 6, AR039: 6, AR179: 5, AR181: 5, AR173: 5, AR188: 5, AR218: 5, AR215: 5, AR269: 5, AR203: 5, AR174: 5, AR186: 5, |
| | | | | AR060: 5, AR219: 5, AR225: 5, AR280: 4, AR177: 4, AR185: 4, AR170: 4, AR283: 4, AR292: 4, AR182: 4, AR314: 4, AR284: 4, AR104: 4, AR205: 4, AR235: 4, AR221: 3, |
| | | | | AR229: 3, AR289: 3, AR206: 3, AR291: 3, AR204: 3, AR234: 3, AR277: 3, AR259: 3, AR256: 3, AR261: 3, AR262: 3, AR231: 3, AR293: 3, AR257: 3, AR228: 3, AR296: 3, |
| | | | | AR295: 3, AR255: 3, AR033: 3, AR298: 3, AR287: 3, AR238: 3, AR285: 3, AR184: 3, AR224: 2, AR315: 2, AR237: 2, AR168: 2, AR061: 2, AR286: 2, AR288: 2, AR211: 2, |
| | | | | AR217: 2, AR252: 2, AR236: 2, AR239: 2, AR171: 2, AR294: 2, AR210: 2, AR172: 2, AR055: 2, AR216: 2, AR227: 2, AR297: 2, AR232: 2, AR258: 2, AR244: 2, AR230: 2, |
| | | | | AR226: 2, AR233: 1, AR281: 1, AR222: 1, AR169: 1, AR214: 1, AR260: 1, L0747: 9, H0251: 8, L0742: 7, L0748: 7, L0439: 7, S0360: 6, |
| | | | | L0754: 6, L0759: 6, H0013: 5, H0553: 5, |
| | | | | H0059: 5, L0770: 5, L0771: 5, L0809: 5, L0664: 5, H0520: 5, L0752: 5, S0140: 4, H0052: 4, H0124: 4, H0616: 4, H0529: 4, L0768: 4, L0794: 4, L0775: 4, L0378: 4, L0665: 4, |
| | | | | H0144: 4, H0658: 4, L0602: 4, S0408: 3, S0132: 3, H0617: 3, H0100: 3, L0639: 3, L5566: 3, L0659: 3, L0666: 3, H0670: 3, S0206: 3, L0751: 3, L0731: 3, L0758: 3, L0605: 3, |
| | | | | S0114: 2, S0442: 2, S0444: 2, L0717: 2, H0550: 2, S0222: 2, H0370: 2, H0392: 2, H0455: 2, H0333: 2, H0486: 2, H0253: 2, H0545: 2, |
| | | | | H0150: 2, H0213: 2, H0644: 2, H0135: 2, |
| | | | | H0413: 2, S0038: 2, L0351: 2, H0494: 2, S0426: 2, L0763: 2, L0769: 2, L0761: 2, L0764: 2, L0773: 2, L0803: 2, L0527: 2, L0657: 2, L0783: 2, L0663: 2, H0547: 2, S0126: 2, |
| | | | | H0684: 2, H0672: 2, H0651: 2, S0406: 2, H0555: 2, H0479: 2, S0028: 2, L0740: 2, L0749: 2, L0750: 2, L0777: 2, L0596: 2, H0170: 1, H0265: 1, H0556: 1, H0686: 1, S0040: 1, |
| | | | | H0716: 1, S0212: 1, H0483: 1, H0255: 1, H0661: 1, H0663: 1, S0418: 1, S0420: 1, L0619: 1, S0358: 1, H0329: 1, H0741: 1, H0208: 1, |
| | | | | H0371: 1, H0645: 1, H0393: 1, H0441: 1, |
| | | | | H0607: 1, H0592: 1, S0005: 1, H0632: 1, L2498: 1, L3653: 1, H0156: 1, L0021: 1, S0010: 1, S0474: 1, H0581: 1, H0194: 1, L0040: 1, H0231: 1, H0544: 1, H0123: 1, L0471: 1, |
| | | | | H0024: 1, H0014: 1, L0163: 1, S0051: 1, H0071: 1, H0594: 1, S0334: 1, H0687: 1, H0039: 1, H0673: 1, H0040: 1, T0067: 1, H0264: 1, H0269: 1, T0041: 1, S0448: 1, S0440: 1, |
| | | | | H0641: 1, H0633: 1, H0647: 1, H0649: 1, S0002: 1, L0796: 1, L0637: 1, L3904: 1, L5575: 1, L5565: 1, L3905: 1, L0772: 1, L0800: 1, L0374: 1, L0644: 1, L0645: 1, L0765: 1, |
| | | | | L0766: 1, L0549: 1, L0650: 1, L0774: 1, L0806: 1, L0805: 1, L0384: 1, L5622: 1, L5623: 1, S0374: 1, H0689: 1, H0690: 1, H0659: 1, H0660: 1, H0666: 1, H0539: 1, S0380: 1, |
| | | | | H0518: 1, S0152: 1, H0521: 1, H0522: 1, H0696: 1, S0146: 1, H0436: 1, H0678: 1, S0390: 1, S3014: 1, S0027: 1, L0745: 1, L0779: 1, L0780: 1, L0753: 1, L0757: 1, S0434: 1, |
| | | | | S0436: 1, L0592: 1, H0653: 1, H0667: 1, S0194: 1, S0276: 1, L0698: 1, L0462: 1 and H0352: 1. |
| 184 | HWBAR88 | 836469 | 194 | AR241: 5, AR263: 4, AR268: 3, AR197: 3, AR214: 3, AR252: 3, AR249: 3, AR193: 2, AR162: 2, AR166: 2, AR161: 2, AR264: 2, AR274: 2, AR163: 2, AR223: 2, AR192: 2, |
| | | | | AR309: 2, AR282: 2, AR216: 2, AR171: 2, AR273: 2, AR292: 2, AR312: 2, AR311: 2, AR201: 2, AR168: 2, AR165: 1, AR299: 1, AR204: 1, AR052: 1, AR198: 1, AR172: 1, |
| | | | | AR297: 1, AR240: 1, AR053: 1, AR178: 1, AR230: 1, AR243: 1, H0580: 2, S0011: 2, L3643: 1, H0650: 1, H0272: 1, H0412: 1, H0144: 1 and H0423: 1. |
| 185 | HWBCB89 | 1093347 | 195 | AR207: 18, AR222: 18, AR283: 17, AR223: 17, AR214: 17, AR263: 16, AR224: 16, AR169: 16, AR089: 15, AR316: 14, AR277: 13, AR172: 13, AR195: 13, AR171: 12, |
| | | | | AR219: 12, AR225: 12, AR096: 12, AR168: 12, AR282: 11, AR235: 11, AR055: 11, AR245: 11, AR221: 11, AR217: 11, AR053: 11, AR313: 11, AR104: 11, |
| | | | | AR192: 11, AR311: 11, AR170: 11, AR264: 10, AR165: 10, AR213: 10, AR299: 10, AR215: 10, AR166: 10, AR164: 10, AR246: 10, |
| | | | | AR216: 9, AR271: 9, AR163: 9, AR308: 9, |
| | | | | AR161: 9, AR162: 9, AR197: 9, AR212: 9, AR198: 9, AR252: 9, AR240: 8, AR039: 8, AR309: 8, AR060: 8, AR185: 8, AR295: 8, AR210: 8, AR300: 8, AR275: 8, AR205: 8, |
| | | | | AR261: 7, AR211: 7, AR312: 7, AR193: 7, AR242: 7, AR177: 7, AR201: 7, AR196: 7, AR033: 7, AR288: 6, AR236: 6, AR272: 6, AR243: 6, AR268: 6, AR174: 6, AR181: 5, |
| | | | | AR173: 5, AR176: 5, AR285: 5, AR274: 5, AR266: 5, AR291: 5, AR238: 5, AR297: 5, AR229: 5, AR204: 5, AR286: 5, AR270: 5, AR296: 5, AR175: 5, AR189: 5, AR289: 5, |
| | | | | AR191: 4, AR247: 4, AR188: 4, AR257: 4, AR199: 4, AR178: 4, AR226: 4, AR269: 4, AR232: 4, AR267: 4, AR183: 4, AR290: 4, AR239: 4, AR190: 4, AR254: 4, AR293: 4, |
| | | | | AR231: 4, AR262: 4, AR258: 4, AR294: 3, AR234: 3, AR200: 3, AR287: 3, AR255: 3, AR237: 3, AR182: 3, AR250: 3, AR260: 3, AR230: 3, AR227: 3, AR061: 3, AR179: 3, |
| | | | | AR180: 3, AR203: 3, AR233: 3, AR256: 2, AR228: 2, AR253: 1, L0777: 6, L0766: 4, H0090: 3, L0759: 3, H0657: 2, S0360: 2, H0318: 2, |
| | | | | L0471: 2, H0031: 2, L0659: 2, L0740: 2, |
| | | | | L0747: 2, L0750: 2, L0758: 2, H0170: 1, H0556: 1, H0656: 1, H0341: 1, S0418: 1, H0637: 1, H0580: 1, H0411: 1, H0549: 1, H0333: 1, |
| | | | | H0013: 1, H0599: 1, H0581: 1, H0545: 1, |
| | | | | H0012: 1, S0003: 1, H0135: 1, H0551: 1, H0488: 1, H0059: 1, H0647: 1, L0520: 1, L0763: 1, L0769: 1, L4556: 1, L0806: 1, L0805: 1, L0647: 1, L0789: 1, L0663: 1, H0144: 1, |
| | | | | S3012: 1, L0748: 1, L0749: 1, L0731: 1, L0757: 1, H0653: 1, H0543: 1, H0423: 1 and H0352: 1. |
| | HWBCB89 | 886210 | 292 | |
| 186 | HWBCP79 | 846382 | 196 | AR313: 44, AR039: 36, AR196: 28, AR089: 27, AR096: 25, AR299: 23, AR300: 21, AR185: 18, AR163: 17, AR161: 17, AR162: 17, AR240: 16, AR277: 15, AR164: 15, |
| | | | | AR218: 15, AR173: 14, AR316: 14, AR165: 14, AR229: 13, AR199: 13, AR247: 12, AR060: 12, AR175: 12, AR234: 11, |
| | | | | AR174: 11, AR264: 11, AR258: 11, AR179: 11, |
| | | | | AR195: 10, AR191: 10, AR192: 10, AR238: 9, AR193: 9, AR219: 9, AR242: 9, AR178: 9, AR293: 9, AR104: 9, AR180: 9, AR262: 9, |
| | | | | AR275: 9, AR177: 9, AR166: 8, AR181: 8, |
| | | | | AR200: 8, AR257: 8, AR053: 8, AR188: 8, AR236: 8, AR282: 8, AR233: 8, AR271: 8, AR296: 7, AR312: 7, AR203: 7, AR226: 7, AR183: 7, AR285: 7, AR197: 7, AR182: 7, |
| | | | | AR230: 7, AR269: 7, AR274: 7, AR235: 7, AR204: 6, AR231: 6, AR189: 6, AR212: 6, AR297: 6, AR237: 6, AR213: 6, AR295: 6, AR198: 6, AR245: 6, AR286: 6, AR287: 6, |
| | | | | AR228: 5, AR263: 5, AR270: 5, AR055: 5, AR272: 5, AR176: 5, AR260: 5, AR294: 5, AR308: 5, AR261: 5, AR239: 5, AR268: 5, AR309: 5, AR033: 5, AR290: 4, AR201: 4, |
| | | | | AR227: 4, AR256: 4, AR288: 4, AR250: 4, AR255: 4, AR190: 4, AR283: 4, AR291: 4, AR243: 3, AR211: 3, AR205: 3, AR210: 3, AR267: 3, AR246: 3, AR215: 3, AR311: 3, |
| | | | | AR207: 3, AR225: 3, AR224: 3, AR289: 2, AR232: 2, AR168: 2, AR223: 2, AR214: 2, AR266: 2, AR222: 2, AR171: 2, |
| | | | | AR254: 2, AR172: 1, AR061: 1, H0580: 1 and H0169: 1. |
| | HWBCP79 | 646977 | 293 | |
| 187 | HWHGP71 | 995431 | 197 | AR244: 4, AR169: 4, AR170: 4, AR215: 3, AR252: 3, AR250: 3, AR180: 3, AR310: 3, AR184: 2, AR207: 2, AR251: 2, AR195: 2, AR264: 2, AR311: 2, AR214: 2, AR282: 1, |
| | | | | AR313: 1, AR165: 1, AR312: 1, AR171: 1, AR270: 1, AR269: 1, AR263: 1, AR212: 1, AR166: 1, AR240: 1, AR223: 1, AR202: 1, AR247: 1, AR239: 1, AR238: 1, AR309: 1, |
| | | | | AR096: 1, AR204: 1, AR168: 1, AR257: 1, H0586: 1, H0457: 1, H0634: 1 and H0521: 1. |
| | HWHGP71 | 839250 | 294 | |
| 188 | HWHQS55 | 762842 | 198 | AR274: 28, AR247: 26, AR272: 21, AR096: 21, AR283: 21, AR213: 20, AR312: 19, AR240: 19, AR161: 18, AR162: 18, AR163: 18, AR172: 17, AR311: 17, AR216: 17, |
| | | | | AR309: 17, AR313: 17, AR291: 17, AR254: 17, AR308: 17, AR165: 16, AR245: 16, AR164: 15, AR089: 15, AR166: 15, AR263: 14, AR282: 13, AR266: 13, AR205: 13, |
| | | | | AR173: 13, AR264: 13, AR171: 13, AR169: 13, AR168: 13, AR170: 13, AR222: 13, AR212: 13, AR270: 12, AR183: 12, AR214: 12, AR039: 11, AR223: 11, AR179: 11, |
| | | | | AR217: 11, AR246: 11, AR316: 11, AR224: 11, AR290: 10, AR175: 10, AR210: 10, AR178: 10, AR243: 10, AR188: 10, AR269: 10, AR271: 10, AR288: 10, AR242: 9, |
| | | | | AR277: 9, AR189: 9, AR289: 9, AR176: 9, AR268: 9, AR181: 9, AR180: 9, AR255: 9, AR250: 9, AR221: 9, AR299: 9, AR253: 9, AR275: 9, AR293: 9, AR297: 9, AR262: 8, |
| | | | | AR267: 8, AR190: 8, AR296: 8, AR177: 8, AR235: 8, AR225: 8, AR174: 8, AR053: 8, AR300: 8, AR257: 8, AR211: 8, AR055: 8, AR197: 8, AR219: 8, AR185: 8, AR218: 8, |
| | | | | AR199: 8, AR060: 7, AR236: 7, AR195: 7, AR287: 7, AR261: 7, AR193: 7, AR215: 7, AR061: 7, AR295: 7, AR258: 7, AR285: 7, AR196: 7, AR192: 6, AR191: 6, AR256: 6, |
| | | | | AR204: 6, AR104: 6, AR207: 6, AR260: 6, AR294: 6, AR201: 6, AR182: 6, AR286: 6, AR231: 5, AR198: 5, AR200: 5, AR033: 5, AR203: 5, AR252: 5, AR233: 4, AR237: 4, |
| | | | | AR234: 4, AR229: 4, AR227: 4, AR238: 4, AR232: 4, AR239: 3, AR230: 3, AR226: 3, AR228: 3, L0439: 6, H0620: 4, L0758: 2, S0040: 1, S0282: 1, H0661: 1, H0619: 1, |
| | | | | H0549: 1, H0587: 1, H0013: 1, L0021: 1, H0230: 1, H0009: 1, H0373: 1, H0135: 1, L0770: 1, L0769: 1, L0776: 1, L0659: 1, L0783: 1, H0144: 1, |
| | | | | H0519: 1, H0593: 1, H0682: 1, |
| | | | | H0659: 1, L0751: 1, L0753: 1 and L0759: 1. |
| 189 | HWLEV32 | 1032602 | 199 | AR039: 14, AR313: 12, AR096: 8, AR089: 7, AR299: 7, AR185: 5, AR277: 5, AR282: 5, AR316: 4, AR300: 4, AR104: 4, AR198: 4, |
| | | | | AR182: 3, AR060: 3, AR240: 3, AR246: 3, |
| | | | | AR178: 3, AR215: 3, AR225: 3, AR263: 2, AR216: 2, AR218: 2, AR201: 2, AR274: 2, AR270: 2, AR227: 2, AR243: 2, AR165: 2, AR164: 2, AR247: 2, AR055: 2, AR269: 2, |
| | | | | AR257: 2, AR179: 2, AR242: 2, AR033: 2, AR309: 2, AR311: 2, AR199: 2, AR205: 2, AR224: 1, AR200: 1, AR275: 1, AR191: 1, AR291: 1, AR168: 1, AR289: 1, AR236: 1, |
| | | | | AR219: 1, AR193: 1, AR230: 1, AR312: 1, AR308: 1, AR192: 1, L0731: 3, S0194: 3, H0392: 2, H0031: 2, H0644: 2, H0494: 2, |
| | | | | L0794: 2, L0803: 2, L0666: 2, S0330: 2, S3014: 2, |
| | | | | L0747: 2, L0777: 2, L0758: 2, S0026: 2, H0556: 1, H0717: 1, S0298: 1, S0282: 1, L3658: 1, S0418: 1, S0356: 1, S0354: 1, S0444: 1, S0360: 1, H0722: 1, L0717: 1, H0431: 1, |
| | | | | S0346: 1, H0421: 1, H0052: 1, H0150: 1, S0388: 1, H0083: 1, H0252: 1, H0604: 1, H0030: 1, H0412: 1, L0769: 1, L0662: 1, L0768: 1, L0375: 1, L0651: 1, L0805: 1, L0657: 1, |
| | | | | L0659: 1, L0809: 1, L0790: 1, L0663: 1, L0438: 1, S0126: 1, S0406: 1, H0555: 1, H0436: 1, S3012: 1, S0027: 1, L0745: 1, L0749: 1, L0750: 1, L0780: 1, H0707: 1, S0436: 1, |
| | | | | L0591: 1 and S0242: 1. |
| | HWLEV32 | 873296 | 295 | |
| | HWLEV32 | 881710 | 296 | |
| | HWLEV32 | 846351 | 297 | |
| 190 | HYBAR01 | 610383 | 200 | AR308: 42, AR192: 7, AR205: 4, AR161: 3, AR198: 3, AR178: 3, AR162: 3, AR163: 3, AR193: 3, AR216: 3, AR169: 3, AR176: 3, AR270: 3, AR089: 3, AR246: 3, AR269: 3, |
| | | | | AR204: 3, AR291: 3, AR039: 2, AR164: 2, AR254: 2, AR215: 2, AR053: 2, AR257: 2, AR171: 2, AR195: 2, AR271: 2, AR201: 2, AR277: 2, AR266: 2, AR060: 2, AR316: 2, |
| | | | | AR173: 2, AR282: 2, AR275: 2, AR262: 2, AR264: 2, AR213: 2, AR288: 2, AR104: 2, AR272: 1, AR182: 1, AR225: 1, AR183: 1, AR166: 1, AR311: 1, AR294: 1, AR165: 1, |
| | | | | AR299: 1, AR283: 1, AR229: 1, AR181: 1, AR312: 1, AR217: 1, H0041: 1, L0471: 1 and L0766: 1. |
| 191 | HYBBE75 | 834784 | 201 | AR215: 6, AR252: 4, AR162: 4, AR161: 4, AR163: 4, AR183: 3, AR309: 3, AR165: 3, AR164: 3, AR176: 3, AR235: 3, AR166: 3, AR270: 3, AR204: 3, AR245: 3, AR192: 3, |
| | | | | AR216: 3, AR193: 2, AR242: 2, AR257: 2, AR277: 2, AR196: 2, AR089: 2, AR201: 2, AR250: 2, AR266: 2, AR313: 2, AR182: 2, AR291: 2, AR255: 2, AR233: 2, AR060: 2, |
| | | | | AR282: 2, AR225: 2, AR197: 2, AR214: 2, AR239: 2, AR247: 2, AR294: 2, AR185: 2, AR293: 2, AR268: 2, AR285: 2, AR177: 2, AR213: 2, AR287: 2, AR178: 2, AR237: 1, |
| | | | | AR174: 1, AR230: 1, AR267: 1, AR316: 1, AR240: 1, AR181: 1, AR096: 1, AR228: 1, AR290: 1, AR286: 1, AR232: 1, AR296: 1, AR262: 1, AR189: 1, AR061: 1, AR221: 1, |
| | | | | AR289: 1, AR226: 1, AR179: 1, AR238: 1, AR236: 1, AR295: 1, AR300: 1, AR210: 1, H0041: 1 |
| 192 | HAPSA79 | 846517 | 202 | AR186: 8, AR310: 7, AR274: 6, AR033: 6, AR218: 5, AR313: 5, AR104: 5, AR219: 5, AR202: 5, AR226: 5, AR039: 4, AR055: 4, AR183: 4, AR246: 4, AR184: 4, AR238: 3, |
| | | | | AR192: 3, AR177: 3, AR163: 3, AR247: 3, AR175: 3, AR309: 3, AR275: 3, AR089: 3, AR273: 3, AR206: 3, AR271: 3, AR251: 3, AR162: 3, AR161: 3, AR164: 3, AR292: 3, |
| | | | | AR282: 3, AR166: 3, AR096: 3, AR237: 3, AR176: 3, AR243: 3, AR227: 3, AR240: 3, AR235: 3, AR299: 3, AR232: 2, AR185: 2, AR259: 2, AR269: 2, AR061: 2, AR165: 2, |
| | | | | AR300: 2, AR245: 2, AR053: 2, AR225: 2, AR221: 2, AR249: 2, AR270: 2, AR204: 2, AR296: 2, AR268: 2, AR277: 2, AR312: 2, AR316: 2, AR261: 2, AR241: 2, AR272: 2, |
| | | | | AR213: 2, AR224: 2, AR242: 2, AR267: 2, AR284: 2, AR257: 2, AR052: 2, AR201: 2, AR295: 2, AR266: 2, AR291: 2, AR193: 2, AR294: 1, AR231: 1, AR173: 1, AR233: 1, |
| | | | | AR197: 1, AR060: 1, AR253: 1, AR195: 1, AR293: 1, AR207: 1, AR217: 1, AR286: 1, AR308: 1, AR205: 1, AR285: 1, AR172: 1, AR178: 1, AR179: 1, AR290: 1, AR256: 1, |
| | | | | AR181: 1, AR216: 1, AR228: 1, AR214: 1, AR198: 1, AR212: 1, AR229: 1, AR244: 1, AR171: 1, AR168: 1, AR182: 1, AR311: 1, L0731: 12, L0747: 9, H0651: 5, L0759: 5, |
| | | | | H0644: 4, H0013: 3, L0748: 3, L0439: 3, L0779: 3, H0575: 2, H0052: 2, H0327: 2, H0050: 2, H0083: 2, L0769: 2, L0662: 2, L0438: 2, H0539: 2, L0743: 2, L0750: 2, L0588: 2, |
| | | | | H0716: 1, L0002: 1, L0443: 1, S0001: 1, S0360: 1, H0645: 1, H0411: 1, H0587: 1, H0333: 1, H0486: 1, S0010: 1, S0050: 1, H0051: 1, H0428: 1, H0553: 1, H0032: 1, L0455: 1, |
| | | | | S0036: 1, H0038: 1, H0412: 1, H0413: 1, H0100: 1, T0042: 1, L0770: 1, L0637: 1, L0766: 1, L0649: 1, L0774: 1, L0776: 1, L0655: 1, L0659: 1, L0783: 1, L0529: 1, L5623: 1, |
| | | | | L0790: 1, L0791: 1, H0520: 1, H0519: 1, H0593: 1, H0689: 1, H0670: 1, H0672: 1, H0696: 1, S3014: 1, L0741: 1, L0744: 1, L0757: 1, L0608: 1 and S0398: 1. |
| | HAPSA79 | 887467 | 298 | |
| | HAPSA79 | 878627 | 299 | |

[0092] Table 1C summarizes additional polynucleotides encompassed by the invention (including cDNA clones related to the sequences (Clone ID:), contig sequences (contig identifier (Contig ID:) contig nucleotide sequence identifiers (SEQ ID NO:X)), and genomic sequences (SEQ ID NO:B). The first column provides a unique clone identifier, “Clone ID:”, for a cDNA clone related to each contig sequence. The second column provides the sequence identifier, “SEQ ID NO:X”, for each contig sequence. The third column provides a unique contig identifier, “Contig ID:” for each contig sequence. The fourth column, provides a BAC identifier “BAC ID NO:A” for the BAC clone referenced in the corresponding row of the table. The fifth column provides the nucleotide sequence identifier, “SEQ ID NO:B” for a fragment of the BAC clone identified in column four of the corresponding row of the table. The sixth column, “Exon From-To”, provides the location (i.e., nucleotide position numbers) within the polynucleotide sequence of SEQ ID NO:B which delineate certain polynucleotides of the invention that are also exemplary members of polynucleotide sequences that encode polypeptides of the invention (e.g., polypeptides containing amino acid sequences encoded by the polynucleotide sequences delineated in column six, and fragments and variants thereof). Table 1C from U.S. patent application Ser. No. 10/664,359, filed Sep. 20, 2003, is herein incorporated by reference.

[0093] Tables 1D.1 and 1D.2: The polynucleotides or polypeptides, or agonists or antagonists of the present invention can be used in assays to test for one or more biological activities. If these polynucleotides and polypeptides do exhibit activity in a particular assay, it is likely that these molecules may be involved in the diseases associated with the biological activity. Thus, the polynucleotides or polypeptides, or agonists or antagonists could be used to treat the associated disease.

[0094] The present invention encompasses methods of detecting, preventing, diagnosing, prognosticating, treating, and/or ameliorating a disease or disorder. In preferred embodiments, the present invention encompasses a method of treating an allergic and/or asthmatic disease or disorder comprising administering to a patient in which such detection, treatment, prevention, and/or amelioration is desired a protein, nucleic acid, or antibody of the invention (or fragment or variant thereof) in an amount effective to detect, prevent, diagnose, prognosticate, treat, and/or ameliorate the allergic and/or asthmatic disease or disorder.

[0095] In another embodiment, the present invention also encompasses methods of detecting, preventing, diagnosing, prognosticating, treating, and/or ameliorating an allergic and/or asthmatic disease or disorder; comprising administering to a patient combinations of the proteins, nucleic acids, or antibodies of the invention (or fragments or variants thereof), sharing similar indications as shown in the corresponding rows in Column 4 of Table 1D.1 or column 2 of Table 1D.2.

[0096] Tables 1D.1 and 1D.2 provide information related to biological activities for polynucleotides and polypeptides of the invention (including antibodies, agonists, and/or antagonists thereof). Tables 1D.1 and 1D.2 also provide information related to assays which may be used to test polynucleotides and polypeptides of the invention (including antibodies, agonists, and/or antagonists thereof) for the corresponding biological activities. The first column (“Gene No.”) provides the gene number in the application for each clone identifier. The second column (“cDNA Clone ID:”) provides the unique clone identifier for each clone as previously described and indicated in Table 1A through Tables 1D.1 and 1D.2. The third column of Table 1D.1 (“AA SEQ ID NO:Y”) indicates the Sequence Listing SEQ ID Number for polypeptide sequences encoded by the corresponding cDNA clones (also as indicated in Tables 1A, Table 1B, and Table 2). The fourth column of Table 1D.1 (“Biological Activity”) indicates a biological activity corresponding to the indicated polypeptides (or polynucleotides encoding said polypeptides). The third column of Table 1D.2 (“Exemplary Activity Assay”) further describes the corresponding biological activity and also provides information pertaining to the various types of assays that may be performed to test, demonstrate, or quantify the corresponding biological activity.

[0097] Tables 1D.1 and 1D.2 describe the use of, inter alia, FMAT technology for testing or demonstrating various biological activities. Fluorometric microvolume assay technology (FMAT) is a fluorescence-based system that provides a means to perform nonradioactive cell- and bead-based assays to detect activation of cell signal transduction pathways. This technology was designed specifically for ligand binding and immunological assays. Using this technology, fluorescent cells or beads at the bottom of the well are detected as localized areas of concentrated fluorescence using a data processing system. Unbound flurophore comprising the background signal is ignored, allowing for a wide variety of homogeneous assays. FMAT technology may be used for peptide ligand binding assays, immunofluorescence, apoptosis, cytotoxicity, and bead-based immunocapture assays. See, Miraglia S et. al., “Homogeneous cell and bead based assays for highthroughput screening using flourometric microvolume assay technology,” Journal of Biomolecular Screening; 4:193-204 (1999). In particular, FMAT technology may be used to test, confirm, and/or identify the ability of polypeptides (including polypeptide fragments and variants) to activate signal transduction pathways. For example, FMAT technology may be used to test, confirm, and/or identify the ability of polypeptides to upregulate production of immunomodulatory proteins (such as, for example, interleukins, GM-CSF, Rantes, and Tumor Necrosis factors, as well as other cellular regulators (e.g. insulin)).

[0098] Tables 1D.1 and 1D.2 also describe the use of kinase assays for testing, demonstrating, or quantifying biological activity. In this regard, the phosphorylation and de-phosphorylation of specific amino acid residues (e.g. Tyrosine, Serine, Threonine) on cell-signal transduction proteins provides a fast, reversible means for activation and de-activation of cellular signal transduction pathways. Moreover, cell signal transduction via phosphorylation/de-phosphorylation is crucial to the regulation of a wide variety of cellular processes (e.g. proliferation, differentiation, migration, apoptosis, etc.). Accordingly, kinase assays provide a powerful tool useful for testing, confirming, and/or identifying polypeptides (including polypeptide fragments and variants) that mediate cell signal transduction events via protein phosphorylation. See e.g., Forrer, P., Tamaskovic R., and Jaussi, R. “Enzyme-Linked Immunosorbent Assay for Measurement of JNK, ERK, and p38 Kinase Activities” Biol. Chem. 379(8-9): 1101-1110 (1998). Table 1D from U.S. patent application Ser. No. 10/664,359, filed Sep. 20, 2003, is herein incorporated by reference.

TABLE 1D.1

| | | | |
|---|---|---|---|
| | | AA | |
| Gene | cDNA | SEQ ID | |
| No. | Clone ID | NO: Y | Biological Activity |

| | | | |
|---|---|---|---|
| 1 | H2MAC30 | 305 | Biological Activity No. 8: Activation of JNK Signaling Pathway in immune cells (such as eosinophils). |
| 1 | H2MAC30 | 305 | Biological Activity No. 44: Activation of transcription through serum response element in immune cells |
| | | | (such as T-cells). |
| 2 | H6EDF66 | 306 | Biological Activity No. 12: Activation of Transcription |
| 2 | H6EDF66 | 306 | Biological Activity No. 15: Activation of transcription through AP1 response element in immune cells |
| | | | (such as T-cells). |
| 2 | H6EDF66 | 306 | Biological Activity No. 48: Activation or inhibition of transcription through NFKB response element in |
| | | | immune cells (such as basophils). |
| 2 | H6EDF66 | 306 | Biological Activity No. 52: Hexosaminidase in RBL-2H3 |
| 2 | H6EDF66 | 306 | Biological Activity No. 57: Inhibition of squalene synthetase gene transcription. |
| 2 | H6EDF66 | 306 | Biological Activity No. 64: Production of IL-10 and activation of T-cells. |
| 3 | H6EDX46 | 307 | Biological Activity No. 44: Activation of transcription through serum response element in immune cells |
| | | | (such as T-cells). |
| 3 | H6EDX46 | 307 | Biological Activity No. 64: Production of IL-10 and activation of T-cells. |
| 4 | HABAG37 | 308 | Biological Activity No. 24: Activation of transcription through GAS response element in immune cells |
| | | | (such as T-cells). |
| 4 | HABAG37 | 308 | Biological Activity No. 39: Activation of transcription through NFKB response element in immune cells |
| | | | (such as T-cells). |
| 5 | HACBD91 | 309 | Biological Activity No. 6: Activation of Endothelial Cell p38 or JNK Signaling Pathway. |
| 5 | HACBD91 | 309 | Biological Activity No. 15: Activation of transcription through AP1 response element in immune cells |
| | | | (such as T-cells). |
| 5 | HACBD91 | 309 | Biological Activity No. 16: Activation of transcription through cAMP response element (CRE) in pre- |
| | | | adipocytes. |
| 5 | HACBD91 | 309 | Biological Activity No. 17: Activation of transcription through cAMP response element in immune cells |
| | | | (such as T-cells). |
| 5 | HACBD91 | 309 | Biological Activity No. 20: Activation of transcription through CD28 response element in immune cells |
| | | | (such as T-cells). |
| 5 | HACBD91 | 309 | Biological Activity No. 21: Activation of transcription through CD28 response element in immune cells |
| | | | (such as T-cells). |
| 5 | HACBD91 | 309 | Biological Activity No. 30: Activation of transcription through NFAT response element in immune cells |
| | | | (such as natural killer cells). |
| 5 | HACBD91 | 309 | Biological Activity No. 31: Activation of transcription through NFAT response element in immune cells |
| | | | (such as T-cells). |
| 5 | HACBD91 | 309 | Biological Activity No. 40: Activation of transcription through NFKB response element in immune cells |
| | | | (such as T-cells). |
| 5 | HACBD91 | 309 | Biological Activity No. 42: Activation of transcription through serum response element in immune cells |
| | | | (such as natural killer cells). |
| 5 | HACBD91 | 309 | Biological Activity No. 47: Activation of transcription through STAT6 response element in immune cells |
| | | | (such as T-cells). |
| 5 | HACBD91 | 309 | Biological Activity No. 68: Production of IL-6 |
| 5 | HACBD91 | 309 | Biological Activity No. 82: Regulation of transcription of Malic Enzyme in adipocytes |
| 6 | HACCI17 | 310 | Biological Activity No. 3: Activation of Adipocyte ERK Signaling Pathway |
| 6 | HACCI17 | 310 | Biological Activity No. 27: Activation of transcription through GATA-3 response element in immune cells |
| | | | (such as mast cells). |
| 6 | HACCI17 | 310 | Biological Activity No. 29: Activation of transcription through NFAT response element in immune cells |
| | | | (such as mast cells). |
| 6 | HACCI17 | 310 | Biological Activity No. 54: IgG in Human B cells SAC |
| 6 | HACCI17 | 310 | Biological Activity No. 61: Production of ICAM in endothelial cells (such as human umbilical vein |
| | | | endothelial cells (HUVEC)) |
| 6 | HACCI17 | 310 | Biological Activity No. 67: Production of IL-5 |
| 6 | HACCI17 | 310 | Biological Activity No. 69: Production of IL-8 by by endothelial cells (such as Human Umbilical Cord |
| | | | Endothelial Cells). |
| 6 | HACCI17 | 310 | Biological Activity No. 70: Production of IL-8 by immune cells (such as the human EOL-1 eosinophil |
| | | | cells) |
| 6 | HACCI17 | 310 | Biological Activity No. 74: Production of RANTES in endothelial cells (such as human umbilical vein |
| | | | endothelial cells (HUVEC)) |
| 6 | HACCI17 | 310 | Biological Activity No. 76: Production of VCAM in endothelial cells (such as human umbilical vein |
| | | | endothelial cells (HUVEC)) |
| 7 | HAGAM64 | 311 | Biological Activity No. 80: Regulation of apoptosis of immune cells (such as mast cells). |
| 8 | HAHDR32 | 312 | Biological Activity No. 39: Activation of transcription through NFKB response element in immune cells |
| | | | (such as T-cells). |
| 8 | HAHDR32 | 312 | Biological Activity No. 57: Inhibition of squalene synthetase gene transcription. |
| 9 | HAIBO71 | 313 | Biological Activity No. 30: Activation of transcription through NFAT response element in immune cells |
| | | | (such as natural killer cells). |
| 9 | HAIBO71 | 313 | Biological Activity No. 50: Endothelial Cell Apoptosis |
| 9 | HAIBO71 | 313 | Biological Activity No. 91: SEAP in NK16/STAT6 |
| 10 | HAJAF57 | 314 | Biological Activity No. 5: Activation of Endothelial Cell JNK Signaling Pathway. |
| 10 | HAJAF57 | 314 | Biological Activity No. 80: Regulation of apoptosis of immune cells (such as mast cells). |
| 11 | HAMFC93 | 315 | Biological Activity No. 65: Production of IL-13 and activation of T-cells. |
| 12 | HAPNY86 | 316 | Biological Activity No. 47: Activation of transcription through STAT6 response element in immune cells |
| | | | (such as T-cells). |
| 13 | HATDF29 | 317 | Biological Activity No. 64: Production of IL-10 and activation of T-cells. |
| 14 | HBAFJ33 | 318 | Biological Activity No. 8: Activation of JNK Signaling Pathway in immune cells (such as eosinophils). |
| 15 | HBAFV19 | 319 | Biological Activity No. 8: Activation of JNK Signaling Pathway in immune cells (such as eosinophils). |
| 16 | HBIBW67 | 320 | Biological Activity No. 57: Inhibition of squalene synthetase gene transcription. |
| 16 | HBIBW67 | 320 | Biological Activity No. 67: Production of IL-5 |
| 17 | HBIMB51 | 321 | Biological Activity No. 8: Activation of JNK Signaling Pathway in immune cells (such as eosinophils). |
| 17 | HBIMB51 | 321 | Biological Activity No. 57: Inhibition of squalene synthetase gene transcription. |
| 18 | HBJID05 | 322 | Biological Activity No. 48: Activation or inhibition of transcription through NFKB response element in |
| | | | immune cells (such as basophils). |
| 18 | HBJID05 | 322 | Biological Activity No. 64: Production of IL-10 and activation of T-cells. |
| 19 | HBJJU28 | 323 | Biological Activity No. 65: Production of IL-13 and activation of T-cells. |
| 20 | HBJLH40 | 324 | Biological Activity No. 47: Activation of transcription through STAT6 response element in immune cells |
| | | | (such as T-cells). |
| 21 | HBXFL29 | 325 | Biological Activity No. 8: Activation of JNK Signaling Pathway in immune cells (such as eosinophils). |
| 22 | HCACU58 | 326 | Biological Activity No. 27: Activation of transcription through GATA-3 response element in immune cells |
| | | | (such as mast cells). |
| 22 | HCACU58 | 326 | Biological Activity No. 44: Activation of transcription through serum response element in immune cells |
| | | | (such as T-cells). |
| 22 | HCACU58 | 326 | Biological Activity No. 61: Production of ICAM in endothelial cells (such as human umbilical vein |
| | | | endothelial cells (HUVEC)) |
| 22 | HCACU58 | 326 | Biological Activity No. 64: Production of IL-10 and activation of T-cells. |
| 23 | HCDBW86 | 327 | Biological Activity No. 57: Inhibition of squalene synthetase gene transcription. |
| 23 | HCDBW86 | 327 | Biological Activity No. 67: Production of IL-5 |
| 24 | HCE3G69 | 328 | Biological Activity No. 57: Inhibition of squalene synthetase gene transcription. |
| 24 | HCE3G69 | 328 | Biological Activity No. 64: Production of IL-10 and activation of T-cells. |
| 24 | HCE3G69 | 328 | Biological Activity No. 77: Proliferation of pre-adipose cells (such as 3T3-L1 cells) |
| 24 | HCE3G69 | 328 | Biological Activity No. 96: Stimulation of insulin secretion from pancreatic beta cells. |
| 25 | HCEEA88 | 329 | Biological Activity No. 57: Inhibition of squalene synthetase gene transcription. |
| 25 | HCEEA88 | 329 | Biological Activity No. 64: Production of IL-10 and activation of T-cells. |
| 26 | HCEFB69 | 330 | Biological Activity No. 22: Activation of transcription through GAS response element in immune cells |
| | | | (such as eosinophils). |
| 26 | HCEFB69 | 330 | Biological Activity No. 64: Production of IL-10 and activation of T-cells. |
| 27 | HCFMV71 | 331 | Biological Activity No. 13: Activation of transcription through AP1 response element in immune cells |
| | | | (such as T-cells). |
| 27 | HCFMV71 | 331 | Biological Activity No. 18: Activation of transcription through cAMP response element in immune cells |
| | | | (such as T-cells). |
| 27 | HCFMV71 | 331 | Biological Activity No. 24: Activation of transcription through GAS response element in immune cells |
| | | | (such as T-cells). |
| 27 | HCFMV71 | 331 | Biological Activity No. 39: Activation of transcription through NFKB response element in immune cells |
| | | | (such as T-cells). |
| 28 | HCNSD93 | 332 | Biological Activity No. 80: Regulation of apoptosis of immune cells (such as mast cells). |
| 29 | HCUIM65 | 333 | Biological Activity No. 16: Activation of transcription through cAMP response element (CRE) in pre- |
| | | | adipocytes. |
| 29 | HCUIM65 | 333 | Biological Activity No. 25: Activation of transcription through GAS response element in immune cells |
| | | | (such as T-cells). |
| 29 | HCUIM65 | 333 | Biological Activity No. 27: Activation of transcription through GATA-3 response element in immune cells |
| | | | (such as mast cells). |
| 29 | HCUIM65 | 333 | Biological Activity No. 29: Activation of transcription through NFAT response element in immune cells |
| | | | (such as mast cells). |
| 29 | HCUIM65 | 333 | Biological Activity No. 30: Activation of transcription through NFAT response element in immune cells |
| | | | (such as natural killer cells). |
| 29 | HCUIM65 | 333 | Biological Activity No. 36: Activation of transcription through NFKB response element in immune cells |
| | | | (such as mast cells). |
| 29 | HCUIM65 | 333 | Biological Activity No. 38: Activation of transcription through NFKB response element in immune cells |
| | | | (such as natural killer cells). |
| 29 | HCUIM65 | 333 | Biological Activity No. 42: Activation of transcription through serum response element in immune cells |
| | | | (such as natural killer cells). |
| 29 | HCUIM65 | 333 | Biological Activity No. 45: Activation of transcription through serum response element in pre-adipocytes. |
| 29 | HCUIM65 | 333 | Biological Activity No. 57: Inhibition of squalene synthetase gene transcription. |
| 29 | HCUIM65 | 333 | Biological Activity No. 76: Production of VCAM in endothelial cells (such as human umbilical vein |
| | | | endothelial cells (HUVEC)) |
| 29 | HCUIM65 | 333 | Biological Activity No. 86: Regulation of transcription via DMEF1 response element in adipocytes and pre- |
| | | | adipocytes |
| 29 | HCUIM65 | 333 | Biological Activity No. 95: Stimulation of Calcium Flux in pancreatic beta cells. |
| 30 | HCWKC15 | 334 | Biological Activity No. 15: Activation of transcription through AP1 response element in immune cells |
| | | | (such as T-cells). |
| 30 | HCWKC15 | 334 | Biological Activity No. 16: Activation of transcription through cAMP response element (CRE) in pre- |
| | | | adipocytes. |
| 30 | HCWKC15 | 334 | Biological Activity No. 21: Activation of transcription through CD28 response element in immune cells |
| | | | (such as T-cells). |
| 30 | HCWKC15 | 334 | Biological Activity No. 22: Activation of transcription through GAS response element in immune cells |
| | | | (such as eosinophils). |
| 30 | HCWKC15 | 334 | Biological Activity No. 25: Activation of transcription through GAS response element in immune cells |
| | | | (such as T-cells). |
| 30 | HCWKC15 | 334 | Biological Activity No. 27: Activation of transcription through GATA-3 response element in immune cells |
| | | | (such as mast cells). |
| 30 | HCWKC15 | 334 | Biological Activity No. 29: Activation of transcription through NFAT response element in immune cells |
| | | | (such as mast cells). |
| 30 | HCWKC15 | 334 | Biological Activity No. 30: Activation of transcription through NFAT response element in immune cells |
| | | | (such as natural killer cells). |
| 30 | HCWKC15 | 334 | Biological Activity No. 31: Activation of transcription through NFAT response element in immune cells |
| | | | (such as T-cells). |
| 30 | HCWKC15 | 334 | Biological Activity No. 34: Activation of transcription through NFKB response element in immune cells |
| | | | (such as basophils). |
| 30 | HCWKC15 | 334 | Biological Activity No. 35: Activation of transcription through NFKB response element in immune cells |
| | | | (such as EOL1 cells). |
| 30 | HCWKC15 | 334 | Biological Activity No. 36: Activation of transcription through NFKB response element in immune cells |
| | | | (such as mast cells). |
| 30 | HCWKC15 | 334 | Biological Activity No. 37: Activation of transcription through NFKB response element in immune cells |
| | | | (such as natural killer cells). |
| 30 | HCWKC15 | 334 | Biological Activity No. 38: Activation of transcription through NFKB response element in immune cells |
| | | | (such as natural killer cells). |
| 30 | HCWKC15 | 334 | Biological Activity No. 40: Activation of transcription through NFKB response element in immune cells |
| | | | (such as T-cells). |
| 30 | HCWKC15 | 334 | Biological Activity No. 42: Activation of transcription through serum response element in immune cells |
| | | | (such as natural killer cells). |
| 30 | HCWKC15 | 334 | Biological Activity No. 45: Activation of transcription through serum response element in pre-adipocytes. |
| 30 | HCWKC15 | 334 | Biological Activity No. 46: Activation of transcription through STAT6 response element in immune cells |
| | | | (such as mast cells). |
| 30 | HCWKC15 | 334 | Biological Activity No. 86: Regulation of transcription via DMEF1 response element in adipocytes and pre- |
| | | | adipocytes |
| 31 | HCWLD74 | 335 | Biological Activity No. 16: Activation of transcription through cAMP response element (CRE) in pre- |
| | | | adipocytes. |
| 31 | HCWLD74 | 335 | Biological Activity No. 19: Activation of transcription through cAMP response element in immune cells |
| | | | (such as T-cells). |
| 31 | HCWLD74 | 335 | Biological Activity No. 25: Activation of transcription through GAS response element in immune cells |
| | | | (such as T-cells). |
| 31 | HCWLD74 | 335 | Biological Activity No. 27: Activation of transcription through GATA-3 response element in immune cells |
| | | | (such as mast cells). |
| 31 | HCWLD74 | 335 | Biological Activity No. 29: Activation of transcription through NFAT response element in immune cells |
| | | | (such as mast cells). |
| 31 | HCWLD74 | 335 | Biological Activity No. 30: Activation of transcription through NFAT response element in immune cells |
| | | | (such as natural killer cells). |
| 31 | HCWLD74 | 335 | Biological Activity No. 42: Activation of transcription through serum response element in immune cells |
| | | | (such as natural killer cells). |
| 31 | HCWLD74 | 335 | Biological Activity No. 91: SEAP in NK16/STAT6 |
| 31 | HCWLD74 | 335 | Biological Activity No. 97: TNFa in Human T-cell 293T |
| 32 | HDHEB60 | 336 | Biological Activity No. 15: Activation of transcription through AP1 response element in immune cells |
| | | | (such as T-cells). |
| 32 | HDHEB60 | 336 | Biological Activity No. 16: Activation of transcription through cAMP response element (CRE) in pre- |
| | | | adipocytes. |
| 32 | HDHEB60 | 336 | Biological Activity No. 21: Activation of transcription through CD28 response element in immune cells |
| | | | (such as T-cells). |
| 32 | HDHEB60 | 336 | Biological Activity No. 25: Activation of transcription through GAS response element in immune cells |
| | | | (such as T-cells). |
| 32 | HDHEB60 | 336 | Biological Activity No. 30: Activation of transcription through NFAT response element in immune cells |
| | | | (such as natural killer cells). |
| 32 | HDHEB60 | 336 | Biological Activity No. 31: Activation of transcription through NFAT response element in immune cells |
| | | | (such as T-cells). |
| 32 | HDHEB60 | 336 | Biological Activity No. 38: Activation of transcription through NFKB response element in immune cells |
| | | | (such as natural killer cells). |
| 32 | HDHEB60 | 336 | Biological Activity No. 40: Activation of transcription through NFKB response element in immune cells |
| | | | (such as T-cells). |
| 32 | HDHEB60 | 336 | Biological Activity No. 47: Activation of transcription through STAT6 response element in immune cells |
| | | | (such as T-cells). |
| 32 | HDHEB60 | 336 | Biological Activity No. 60: Myoblast cell proliferation |
| 32 | HDHEB60 | 336 | Biological Activity No. 76: Production of VCAM in endothelial cells (such as human umbilical vein |
| | | | endothelial cells (HUVEC)) |
| 32 | HDHEB60 | 336 | Biological Activity No. 91: SEAP in NK16/STAT6 |
| 33 | HDHMA45 | 337 | Biological Activity No. 53: IFNg in Human T-cell 293T |
| 33 | HDHMA45 | 337 | Biological Activity No. 64: Production of IL-10 and activation of T-cells. |
| 33 | HDHMA45 | 337 | Biological Activity No. 90: SEAP in Jurkat/IL4 promoter |
| 34 | HDHMA72 | 338 | Biological Activity No. 37: Activation of transcription through NFKB response element in immune cells |
| | | | (such as natural killer cells). |
| 35 | HDPBA28 | 339 | Biological Activity No. 64: Production of IL-10 and activation of T-cells. |
| 35 | HDPBA28 | 339 | Biological Activity No. 96: Stimulation of insulin secretion from pancreatic beta cells. |
| 36 | HDPCO25 | 340 | Biological Activity No. 40: Activation of transcription through NFKB response element in immune cells |
| | | | (such as T-cells). |
| 36 | HDPCO25 | 340 | Biological Activity No. 87: Regulation of viability and proliferation of pancreatic beta cells. |
| 37 | HDPCY37 | 341 | Biological Activity No. 16: Activation of transcription through cAMP response element (CRE) in pre- |
| | | | adipocytes. |
| 37 | HDPCY37 | 341 | Biological Activity No. 40: Activation of transcription through NFKB response element in immune cells |
| | | | (such as T-cells). |
| 37 | HDPCY37 | 341 | Biological Activity No. 64: Production of IL-10 and activation of T-cells. |
| 38 | HDPHI51 | 342 | Biological Activity No. 47: Activation of transcription through STAT6 response element in immune cells |
| | | | (such as T-cells). |
| 38 | HDPHI51 | 342 | Biological Activity No. 84: Regulation of transcription through the FAS promoter element in hepatocytes |
| 39 | HDPND46 | 343 | Biological Activity No. 4: Activation of Adipocyte PI3 Kinase Signalling Pathway |
| 39 | HDPND46 | 343 | Biological Activity No. 66: Production of IL-4 |
| 39 | HDPND46 | 343 | Biological Activity No. 69: Production of IL-8 by by endothelial cells (such as Human Umbilical Cord |
| | | | Endothelial Cells). |
| 40 | HDPOH06 | 344 | Biological Activity No. 62: Production of ICAM-1 |
| 40 | HDPOH06 | 344 | Biological Activity No. 64: Production of IL-10 and activation of T-cells. |
| 41 | HDPSP54 | 345 | Biological Activity No. 5: Activation of Endothelial Cell JNK Signaling Pathway. |
| 41 | HDPSP54 | 345 | Biological Activity No. 64: Production of IL-10 and activation of T-cells. |
| 41 | HDPSP54 | 345 | Biological Activity No. 79: Regulation of apoptosis in pancreatic beta cells. |
| 42 | HDPVH60 | 346 | Biological Activity No. 40: Activation of transcription through NFKB response element in immune cells |
| | | | (such as T-cells). |
| 43 | HDPWN93 | 347 | Biological Activity No. 6: Activation of Endothelial Cell p38 or JNK Signaling Pathway. |
| 43 | HDPWN93 | 347 | Biological Activity No. 8: Activation of JNK Signaling Pathway in immune cells (such as eosinophils). |
| 44 | HDQHD03 | 348 | Biological Activity No. 64: Production of IL-10 and activation of T-cells. |
| 45 | HE2EN04 | 349 | Biological Activity No. 8: Activation of JNK Signaling Pathway in immune cells (such as eosinophils). |
| 46 | HE8QV67 | 350 | Biological Activity No. 66: Production of IL-4 |
| 47 | HE8UB86 | 351 | Biological Activity No. 64: Production of IL-10 and activation of T-cells. |
| 48 | HE9BK23 | 352 | Biological Activity No. 21: Activation of transcription through CD28 response element in immune cells |
| | | | (such as T-cells). |
| 48 | HE9BK23 | 352 | Biological Activity No. 39: Activation of transcription through NFKB response element in immune cells |
| | | | (such as T-cells). |
| 49 | HEBBN36 | 353 | Biological Activity No. 80: Regulation of apoptosis of immune cells (such as mast cells). |
| 50 | HEQCC55 | 354 | Biological Activity No. 65: Production of IL-13 and activation of T-cells. |
| 50 | HEQCC55 | 354 | Biological Activity No. 71: Production of MCP-1 |
| 51 | HESAJ10 | 355 | Biological Activity No. 80: Regulation of apoptosis of immune cells (such as mast cells). |
| 52 | HETEU28 | 356 | Biological Activity No. 67: Production of IL-5 |
| 52 | HETEU28 | 356 | Biological Activity No. 92: SEAP in OE-33 |
| 53 | HFABG18 | 357 | Biological Activity No. 3: Activation of Adipocyte ERK Signaling Pathway |
| 53 | HFABG18 | 357 | Biological Activity No. 63: Production of IFNgamma using a T cells |
| 53 | HFABG18 | 357 | Biological Activity No. 78: Protection from Endothelial Cell Apoptosis. |
| 54 | HFAMB72 | 358 | Biological Activity No. 8: Activation of JNK Signaling Pathway in immune cells (such as eosinophils). |
| 55 | HFCCQ50 | 359 | Biological Activity No. 23: Activation of transcription through GAS response element in immune cells |
| | | | (such as monocytes). |
| 55 | HFCCQ50 | 359 | Biological Activity No. 41: Activation of transcription through NFKB response element in immune cells |
| | | | (such as the Jurkat human T cell line). |
| 55 | HFCCQ50 | 359 | Biological Activity No. 66: Production of IL-4 |
| 55 | HFCCQ50 | 359 | Biological Activity No. 75: Production of TNF alpha by dendritic cells |
| 56 | HFIIZ70 | 360 | Biological Activity No. 8: Activation of JNK Signaling Pathway in immune cells (such as eosinophils). |
| 57 | HFKET18 | 361 | Biological Activity No. 9: Activation of Natural Killer Cell ERK Signaling Pathway. |
| 57 | HFKET18 | 361 | Biological Activity No. 32: Activation of transcription through NFAT response in immune cells (such as T- |
| | | | cells). |
| 57 | HFKET18 | 361 | Biological Activity No. 80: Regulation of apoptosis of immune cells (such as mast cells). |
| 58 | HFLNB64 | 362 | Biological Activity No. 67: Production of IL-5 |
| 59 | HFOXA73 | 363 | Biological Activity No. 64: Production of IL-10 and activation of T-cells. |
| 60 | HFPAC12 | 364 | Biological Activity No. 80: Regulation of apoptosis of immune cells (such as mast cells). |
| 61 | HFPAO71 | 365 | Biological Activity No. 8: Activation of JNK Signaling Pathway in immune cells (such as eosinophils). |
| 61 | HFPAO71 | 365 | Biological Activity No. 69: Production of IL-8 by by endothelial cells (such as Human Umbilical Cord |
| | | | Endothelial Cells). |
| 61 | HFPAO71 | 365 | Biological Activity No. 70: Production of IL-8 by immune cells (such as the human EOL-1 eosinophil |
| | | | cells) |
| 62 | HFPCX36 | 366 | Biological Activity No. 40: Activation of transcription through NFKB response element in immune cells |
| | | | (such as T-cells). |
| 62 | HFPCX36 | 366 | Biological Activity No. 93: SEAP in Senescence Assay |
| 63 | HFPCX64 | 367 | Biological Activity No. 67: Production of IL-5 |
| 64 | HFTBM50 | 368 | Biological Activity No. 59: Insulin Secretion |
| 64 | HFTBM50 | 368 | Biological Activity No. 64: Production of IL-10 and activation of T-cells. |
| 65 | HFXDJ75 | 369 | Biological Activity No. 15: Activation of transcription through AP1 response element in immune cells |
| | | | (such as T-cells). |
| 65 | HFXDJ75 | 369 | Biological Activity No. 21: Activation of transcription through CD28 response element in immune cells |
| | | | (such as T-cells). |
| 65 | HFXDJ75 | 369 | Biological Activity No. 40: Activation of transcription through NFKB response element in immune cells |
| | | | (such as T-cells). |
| 66 | HFXJU68 | 370 | Biological Activity No. 16: Activation of transcription through cAMP response element (CRE) in pre- |
| | | | adipocytes. |
| 66 | HFXJU68 | 370 | Biological Activity No. 57: Inhibition of squalene synthetase gene transcription. |
| 66 | HFXJU68 | 370 | Biological Activity No. 64: Production of IL-10 and activation of T-cells. |
| 67 | HGBIB74 | 371 | Biological Activity No. 25: Activation of transcription through GAS response element in immune cells |
| | | | (such as T-cells). |
| 67 | HGBIB74 | 371 | Biological Activity No. 30: Activation of transcription through NFAT response element in immune cells |
| | | | (such as natural killer cells). |
| 67 | HGBIB74 | 371 | Biological Activity No. 42: Activation of transcription through serum response element in immune cells |
| | | | (such as natural killer cells). |
| 68 | HHEMA75 | 372 | Biological Activity No. 15: Activation of transcription through AP1 response element in immune cells |
| | | | (such as T-cells). |
| 68 | HHEMA75 | 372 | Biological Activity No. 18: Activation of transcription through cAMP response element in immune cells |
| | | | (such as T-cells). |
| 68 | HHEMA75 | 372 | Biological Activity No. 21: Activation of transcription through CD28 response element in immune cells |
| | | | (such as T-cells). |
| 68 | HHEMA75 | 372 | Biological Activity No. 25: Activation of transcription through GAS response element in immune cells |
| | | | (such as T-cells). |
| 68 | HHEMA75 | 372 | Biological Activity No. 30: Activation of transcription through NFAT response element in immune cells |
| | | | (such as natural killer cells). |
| 68 | HHEMA75 | 372 | Biological Activity No. 31: Activation of transcription through NFAT response element in immune cells |
| | | | (such as T-cells). |
| 68 | HHEMA75 | 372 | Biological Activity No. 40: Activation of transcription through NFKB response element in immune cells |
| | | | (such as T-cells). |
| 69 | HHENK42 | 373 | Biological Activity No. 65: Production of IL-13 and activation of T-cells. |
| 70 | HHEPM33 | 374 | Biological Activity No. 16: Activation of transcription through cAMP response element (CRE) in pre- |
| | | | adipocytes. |
| 70 | HHEPM33 | 374 | Biological Activity No. 25: Activation of transcription through GAS response element in immune cells |
| | | | (such as T-cells). |
| 70 | HHEPM33 | 374 | Biological Activity No. 27: Activation of transcription through GATA-3 response element in immune cells |
| | | | (such as mast cells). |
| 70 | HHEPM33 | 374 | Biological Activity No. 29: Activation of transcription through NFAT response element in immune cells |
| | | | (such as mast cells). |
| 70 | HHEPM33 | 374 | Biological Activity No. 30: Activation of transcription through NFAT response element in immune cells |
| | | | (such as natural killer cells). |
| 70 | HHEPM33 | 374 | Biological Activity No. 42: Activation of transcription through serum response element in immune cells |
| | | | (such as natural killer cells). |
| 71 | HHEPT60 | 375 | Biological Activity No. 37: Activation of transcription through NFKB response element in immune cells |
| | | | (such as natural killer cells). |
| 72 | HHFHJ59 | 376 | Biological Activity No. 64: Production of IL-10 and activation of T-cells. |
| 73 | HHGDW43 | 377 | Biological Activity No. 15: Activation of transcription through AP1 response element in immune cells |
| | | | (such as T-cells). |
| 73 | HHGDW43 | 377 | Biological Activity No. 64: Production of IL-10 and activation of T-cells. |
| 74 | HHPEC09 | 378 | Biological Activity No. 64: Production of IL-10 and activation of T-cells. |
| 75 | HHPTJ65 | 379 | Biological Activity No. 80: Regulation of apoptosis of immune cells (such as mast cells). |
| 76 | HJABX32 | 380 | Biological Activity No. 64: Production of IL-10 and activation of T-cells. |
| 77 | HJBCU04 | 381 | Biological Activity No. 26: Activation of transcription through GAS response element in immune cells |
| | | | (such as T-cells). |
| 77 | HJBCU04 | 381 | Biological Activity No. 66: Production of IL-4 |
| 77 | HJBCU04 | 381 | Biological Activity No. 94: SEAP in SW480 |
| 78 | HJMBN89 | 382 | Biological Activity No. 64: Production of IL-10 and activation of T-cells. |
| 79 | HJMBW30 | 383 | Biological Activity No. 40: Activation of transcription through NFKB response element in immune cells |
| | | | (such as T-cells). |
| 80 | HKABI84 | 384 | Biological Activity No. 32: Activation of transcription through NFAT response in immune cells (such as T- |
| | | | cells). |
| 80 | HKABI84 | 384 | Biological Activity No. 39: Activation of transcription through NFKB response element in immune cells |
| | | | (such as T-cells). |
| 80 | HKABI84 | 384 | Biological Activity No. 50: Endothelial Cell Apoptosis |
| 81 | HKACB56 | 385 | Biological Activity No. 6: Activation of Endothelial Cell p38 or JNK Signaling Pathway. |
| 81 | HKACB56 | 385 | Biological Activity No. 60: Myoblast cell proliferation |
| 81 | HKACB56 | 385 | Biological Activity No. 67: Production of IL-5 |
| 81 | HKACB56 | 385 | Biological Activity No. 74: Production of RANTES in endothelial cells (such as human umbilical vein |
| | | | endothelial cells (HUVEC)) |
| 81 | HKACB56 | 385 | Biological Activity No. 76: Production of VCAM in endothelial cells (such as human umbilical vein |
| | | | endothelial cells (HUVEC)) |
| 82 | HKACM93 | 386 | Biological Activity No. 22: Activation of transcription through GAS response element in immune cells |
| | | | (such as eosinophils). |
| 82 | HKACM93 | 386 | Biological Activity No. 24: Activation of transcription through GAS response element in immune cells |
| | | | (such as T-cells). |
| 82 | HKACM93 | 386 | Biological Activity No. 39: Activation of transcription through NFKB response element in immune cells |
| | | | (such as T-cells). |
| 83 | HKADQ91 | 387 | Biological Activity No. 64: Production of IL-10 and activation of T-cells. |
| 84 | HKAEG43 | 388 | Biological Activity No. 67: Production of IL-5 |
| 85 | HKDBF34 | 389 | Biological Activity No. 39: Activation of transcription through NFKB response element in immune cells |
| | | | (such as T-cells). |
| 86 | HKISB57 | 390 | Biological Activity No. 8: Activation of JNK Signaling Pathway in immune cells (such as eosinophils). |
| 86 | HKISB57 | 390 | Biological Activity No. 82: Regulation of transcription of Malic Enzyme in adipocytes |
| 87 | HKIYP40 | 391 | Biological Activity No. 64: Production of IL-10 and activation of T-cells. |
| 88 | HKMLK53 | 392 | Biological Activity No. 8: Activation of JNK Signaling Pathway in immune cells (such as eosinophils). |
| 89 | HLDON23 | 393 | Biological Activity No. 62: Production of ICAM-1 |
| 89 | HLDON23 | 393 | Biological Activity No. 64: Production of IL-10 and activation of T-cells. |
| 89 | HLDON23 | 393 | Biological Activity No. 76: Production of VCAM in endothelial cells (such as human umbilical vein |
| | | | endothelial cells (HUVEC)) |
| 89 | HLDON23 | 393 | Biological Activity No. 85: Regulation of transcription through the PEPCK promoter in hepatocytes |
| 90 | HLDOW79 | 394 | Biological Activity No. 15: Activation of transcription through AP1 response element in immune cells |
| | | | (such as T-cells). |
| 90 | HLDOW79 | 394 | Biological Activity No. 21: Activation of transcription through CD28 response element in immune cells |
| | | | (such as T-cells). |
| 90 | HLDOW79 | 394 | Biological Activity No. 27: Activation of transcription through GATA-3 response element in immune cells |
| | | | (such as mast cells). |
| 90 | HLDOW79 | 394 | Biological Activity No. 29: Activation of transcription through NFAT response element in immune cells |
| | | | (such as mast cells). |
| 90 | HLDOW79 | 394 | Biological Activity No. 31: Activation of transcription through NFAT response element in immune cells |
| | | | (such as T-cells). |
| 90 | HLDOW79 | 394 | Biological Activity No. 40: Activation of transcription through NFKB response element in immune cells |
| | | | (such as T-cells). |
| 90 | HLDOW79 | 394 | Biological Activity No. 77: Proliferation of pre-adipose cells (such as 3T3-L1 cells) |
| 91 | HLJBJ61 | 395 | Biological Activity No. 28: Activation of transcription through GATA-3 response element in immune cells |
| | | | (such as T-cells). |
| 92 | HLQDH79 | 396 | Biological Activity No. 64: Production of IL-10 and activation of T-cells. |
| 93 | HLTHG37 | 397 | Biological Activity No. 47: Activation of transcription through STAT6 response element in immune cells |
| | | | (such as T-cells). |
| 94 | HLWAE11 | 398 | Biological Activity No. 37: Activation of transcription through NFKB response element in immune cells |
| | | | (such as natural killer cells). |
| 94 | HLWAE11 | 398 | Biological Activity No. 44: Activation of transcription through serum response element in immune cells |
| | | | (such as T-cells). |
| 94 | HLWAE11 | 398 | Biological Activity No. 49: Calcium flux in immune cells (such as monocytes) |
| 94 | HLWAE11 | 398 | Biological Activity No. 76: Production of VCAM in endothelial cells (such as human umbilical vein |
| | | | endothelial cells (HUVEC)) |
| 95 | HLWAY54 | 399 | Biological Activity No. 8: Activation of JNK Signaling Pathway in immune cells (such as eosinohils). |
| 95 | HLWAY54 | 399 | Biological Activity No. 71: Production of MCP-1 |
| 95 | HLWAY54 | 399 | Biological Activity No. 89: SEAP in HepG2/Squale-synthetase(stimulation) |
| 96 | HLWCF05 | 400 | Biological Activity No. 4: Activation of Adipocyte PI3 Kinase Signalling Pathway |
| 96 | HLWCF05 | 400 | Biological Activity No. 8: Activation of JNK Signaling Pathway in immune cells (such as eosinophils). |
| 96 | HLWCF05 | 400 | Biological Activity No. 15: Activation of transcription through AP1 response element in immune cells |
| | | | (such as T-cells). |
| 96 | HLWCF05 | 400 | Biological Activity No. 21: Activation of transcription through CD28 response element in immune cells |
| | | | (such as T-cells). |
| 96 | HLWCF05 | 400 | Biological Activity No. 31: Activation of transcription through NFAT response element in immune cells |
| | | | (such as T-cells). |
| 96 | HLWCF05 | 400 | Biological Activity No. 40: Activation of transcription through NFKB response element in immune cells |
| | | | (such as T-cells). |
| 98 | HLYAZ61 | 402 | Biological Activity No. 8: Activation of JNK Signaling Pathway in immune cells (such as eosinophils). |
| 99 | HMADS41 | 403 | Biological Activity No. 7: Activation of Hepatocyte ERK Signaling Pathway |
| 99 | HMADS41 | 403 | Biological Activity No. 78: Protection from Endothelial Cell Apoptosis. |
| 99 | HMADS41 | 403 | Biological Activity No. 80: Regulation of apoptosis of immune cells (such as mast cells). |
| 100 | HMADU73 | 404 | Biological Activity No. 64: Production of IL-10 and activation of T-cells. |
| 100 | HMADU73 | 404 | Biological Activity No. 68: Production of IL-6 |
| 100 | HMADU73 | 404 | Biological Activity No. 75: Production of TNF alpha by dendritic cells |
| 101 | HMIAL37 | 405 | Biological Activity No. 8: Activation of JNK Signaling Pathway in immune cells (such as eosinophils). |
| 101 | HMIAL37 | 405 | Biological Activity No. 64: Production of IL-10 and activation of T-cells. |
| 102 | HMKCG09 | 406 | Biological Activity No. 63: Production of IFNgamma using a T cells |
| 102 | HMKCG09 | 406 | Biological Activity No. 64: Production of IL-10 and activation of T-cells. |
| 102 | HMKCG09 | 406 | Biological Activity No. 88: Regulation of viability or proliferation of immune cells (such as human |
| | | | eosinophil EOL-1 cells). |
| 103 | HMMAH60 | 407 | Biological Activity No. 9: Activation of Natural Killer Cell ERK Signaling Pathway. |
| 103 | HMMAH60 | 407 | Biological Activity No. 64: Production of IL-10 and activation of T-cells. |
| 104 | HMQDT36 | 408 | Biological Activity No. 65: Production of IL-13 and activation of T-cells. |
| 105 | HMSHS36 | 409 | Biological Activity No. 8: Activation of JNK Signaling Pathway in immune cells (such as eosinophils). |
| 105 | HMSHS36 | 409 | Biological Activity No. 30: Activation of transcription through NFAT response element in immune cells |
| | | | (such as natural killer cells). |
| 105 | HMSHS36 | 409 | Biological Activity No. 42: Activation of transcription through serum response element in immune cells |
| | | | (such as natural killer cells). |
| 106 | HMSJU68 | 410 | Biological Activity No. 10: Activation of Skeletal Mucle Cell PI3 Kinase Signalling Pathway |
| 106 | HMSJU68 | 410 | Biological Activity No. 35: Activation of transcription through NFKB response element in immune cells |
| | | | (such as EOL1 cells). |
| 106 | HMSJU68 | 410 | Biological Activity No. 80: Regulation of apoptosis of immune cells (such as mast cells). |
| 107 | HMSKC04 | 411 | Biological Activity No. 14: Activation of transcription through AP1 response element in immune cells |
| | | | (such as T-cells). |
| 107 | HMSKC04 | 411 | Biological Activity No. 15: Activation of transcription through AP1 response element in immune cells |
| | | | (such as T-cells). |
| 107 | HMSKC04 | 411 | Biological Activity No. 21: Activation of transcription through CD28 response element in immune cells |
| | | | (such as T-cells). |
| 107 | HMSKC04 | 411 | Biological Activity No. 25: Activation of transcription through GAS response element in immune cells |
| | | | (such as T-cells). |
| 107 | HMSKC04 | 411 | Biological Activity No. 27: Activation of transcription through GATA-3 response element in immune cells |
| | | | (such as mast cells). |
| 107 | HMSKC04 | 411 | Biological Activity No. 29: Activation of transcription through NFAT response element in immune cells |
| | | | (such as mast cells). |
| 107 | HMSKC04 | 411 | Biological Activity No. 30: Activation of transcription through NFAT response element in immune cells |
| | | | (such as natural killer cells). |
| 107 | HMSKC04 | 411 | Biological Activity No. 31: Activation of transcription through NFAT response element in immune cells |
| | | | (such as T-cells). |
| 107 | HMSKC04 | 411 | Biological Activity No. 40: Activation of transcription through NFKB response element in immune cells |
| | | | (such as T-cells). |
| 107 | HMSKC04 | 411 | Biological Activity No. 42: Activation of transcription through serum response element in immune cells |
| | | | (such as natural killer cells). |
| 107 | HMSKC04 | 411 | Biological Activity No. 47: Activation of transcription through STAT6 response element in immune cells |
| | | | (such as T-cells). |
| 107 | HMSKC04 | 411 | Biological Activity No. 74: Production of RANTES in endothelial cells (such as human umbilical vein |
| | | | endothelial cells (HUVEC)) |
| 108 | HMTAD67 | 412 | Biological Activity No. 64: Production of IL-10 and activation of T-cells. |
| 109 | HMWFO02 | 413 | Biological Activity No. 66: Production of IL-4 |
| 110 | HMWFY10 | 414 | Biological Activity No. 61: Production of ICAM in endothelial cells (such as human umbilical vein |
| | | | endothelial cells (HUVEC)) |
| 110 | HMWFY10 | 414 | Biological Activity No. 64: Production of IL-10 and activation of T-cells. |
| 110 | HMWFY10 | 414 | Biological Activity No. 69: Production of IL-8 by by endothelial cells (such as Human Umbilical Cord |
| | | | Endothelial Cells). |
| 110 | HMWFY10 | 414 | Biological Activity No. 70: Production of IL-8 by immune cells (such as the human EOL-1 eosinophil |
| | | | cells) |
| 111 | HNGBT31 | 415 | Biological Activity No. 39: Activation of transcription through NFKB response element in immune cells |
| | | | (such as T-cells). |
| 112 | HNGEO29 | 416 | Biological Activity No. 8: Activation of JNK Signaling Pathway in immune cells (such as eosinophils). |
| 113 | HNGIQ46 | 417 | Biological Activity No. 8: Activation of JNK Signaling Pathway in immune cells (such as eosinophils). |
| 114 | HNGJP69 | 418 | Biological Activity No. 8: Activation of JNK Signaling Pathway in immune cells (such as eosinophils). |
| 114 | HNGJP69 | 418 | Biological Activity No. 16: Activation of transcription through cAMP response element (CRE) in pre- |
| | | | adipocytes. |
| 114 | HNGJP69 | 418 | Biological Activity No. 27: Activation of transcription through GATA-3 response element in immune cells |
| | | | (such as mast cells). |
| 114 | HNGJP69 | 418 | Biological Activity No. 29: Activation of transcription through NFAT response element in immune cells |
| | | | (such as mast cells). |
| 114 | HNGJP69 | 418 | Biological Activity No. 34: Activation of transcription through NFKB response element in immune cells |
| | | | (such as basophils). |
| 114 | HNGJP69 | 418 | Biological Activity No. 45: Activation of transcription through serum response element in pre-adipocytes. |
| 115 | HNGOI12 | 419 | Biological Activity No. 64: Production of IL-10 and activation of T-cells. |
| 115 | HNGOI12 | 419 | Biological Activity No. 95: Stimulation of Calcium Flux in pancreatic beta cells. |
| 116 | HNHOD46 | 420 | Biological Activity No. 3: Activation of Adipocyte ERK Signaling Pathway |
| 116 | HNHOD46 | 420 | Biological Activity No. 15: Activation of transcription through AP1 response element in immune cells |
| | | | (such as T-cells). |
| 116 | HNHOD46 | 420 | Biological Activity No. 16: Activation of transcription through cAMP response element (CRE) in pre- |
| | | | adipocytes. |
| 116 | HNHOD46 | 420 | Biological Activity No. 17: Activation of transcription through cAMP response element in immune cells |
| | | | (such as T-cells). |
| 116 | HNHOD46 | 420 | Biological Activity No. 18: Activation of transcription through cAMP response element in immune cells |
| | | | (such as T-cells). |
| 116 | HNHOD46 | 420 | Biological Activity No. 21: Activation of transcription through CD28 response element in immune cells |
| | | | (such as T-cells). |
| 116 | HNHOD46 | 420 | Biological Activity No. 24: Activation of transcription through GAS response element in immune cells |
| | | | (such as T-cells). |
| 116 | HNHOD46 | 420 | Biological Activity No. 25: Activation of transcription through GAS response element in immune cells |
| | | | (such as T-cells). |
| 116 | HNHOD46 | 420 | Biological Activity No. 27: Activation of transcription through GATA-3 response element in immune cells |
| | | | (such as mast cells). |
| 116 | HNHOD46 | 420 | Biological Activity No. 29: Activation of transcription through NFAT response element in immune cells |
| | | | (such as mast cells). |
| 116 | HNHOD46 | 420 | Biological Activity No. 31: Activation of transcription through NFAT response element in immune cells |
| | | | (such as T-cells). |
| 116 | HNHOD46 | 420 | Biological Activity No. 32: Activation of transcription through NFAT response in immune cells (such as T- |
| | | | cells). |
| 116 | HNHOD46 | 420 | Biological Activity No. 34: Activation of transcription through NFKB response element in immune cells |
| | | | (such as basophils). |
| 116 | HNHOD46 | 420 | Biological Activity No. 37: Activation of transcription through NFKB response element in immune cells |
| | | | (such as natural killer cells). |
| 116 | HNHOD46 | 420 | Biological Activity No. 39: Activation of transcription through NFKB response element in immune cells |
| | | | (such as T-cells). |
| 116 | HNHOD46 | 420 | Biological Activity No. 40: Activation of transcription through NFKB response element in immune cells |
| | | | (such as T-cells). |
| 116 | HNHOD46 | 420 | Biological Activity No. 42: Activation of transcription through serum response element in immune cells |
| | | | (such as natural killer cells). |
| 116 | HNHOD46 | 420 | Biological Activity No. 44: Activation of transcription through serum response element in immune cells |
| | | | (such as T-cells). |
| 116 | HNHOD46 | 420 | Biological Activity No. 45: Activation of transcription through serum response element in pre-adipocytes. |
| 116 | HNHOD46 | 420 | Biological Activity No. 47: Activation of transcription through STAT6 response element in immune cells |
| | | | (such as T-cells). |
| 116 | HNHOD46 | 420 | Biological Activity No. 68: Production of IL-6 |
| 116 | HNHOD46 | 420 | Biological Activity No. 72: Production of MIP1alpha |
| 116 | HNHOD46 | 420 | Biological Activity No. 77: Proliferation of pre-adipose cells (such as 3T3-L1 cells) |
| 116 | HNHOD46 | 420 | Biological Activity No. 86: Regulation of transcription via DMEF1 response element in adipocytes and pre- |
| | | | adipocytes |
| 117 | HNTBL27 | 421 | Biological Activity No. 64: Production of IL-10 and activation of T-cells. |
| 117 | HNTBL27 | 421 | Biological Activity No. 79: Regulation of apoptosis in pancreatic beta cells. |
| 118 | HNTNI01 | 422 | Biological Activity No. 16: Activation of transcription through cAMP response element (CRE) in pre- |
| | | | adipocytes. |
| 118 | HNTNI01 | 422 | Biological Activity No. 22: Activation of transcription through GAS response element in immune cells |
| | | | (such as eosinophils). |
| 118 | HNTNI01 | 422 | Biological Activity No. 25: Activation of transcription through GAS response element in immune cells |
| | | | (such as T-cells). |
| 118 | HNTNI01 | 422 | Biological Activity No. 27: Activation of transcription through GATA-3 response element in immune cells |
| | | | (such as mast cells). |
| 118 | HNTNI01 | 422 | Biological Activity No. 29: Activation of transcription through NFAT response element in immune cells |
| | | | (such as mast cells). |
| 118 | HNTNI01 | 422 | Biological Activity No. 30: Activation of transcription through NFAT response element in immune cells |
| | | | (such as natural killer cells). |
| 118 | HNTNI01 | 422 | Biological Activity No. 34: Activation of transcription through NFKB response element in immune cells |
| | | | (such as basophils). |
| 118 | HNTNI01 | 422 | Biological Activity No. 35: Activation of transcription through NFKB response element in immune cells |
| | | | (such as EOL1 cells). |
| 118 | HNTNI01 | 422 | Biological Activity No. 36: Activation of transcription through NFKB response element in immune cells |
| | | | (such as mast cells). |
| 118 | HNTNI01 | 422 | Biological Activity No. 45: Activation of transcription through serum response element in pre-adipocytes. |
| 118 | HNTNI01 | 422 | Biological Activity No. 46: Activation of transcription through STAT6 response element in immune cells |
| | | | (such as mast cells). |
| 118 | HNTNI01 | 422 | Biological Activity No. 82: Regulation of transcription of Malic Enzyme in adipocytes |
| 118 | HNTNI01 | 422 | Biological Activity No. 86: Regulation of transcription via DMEF1 response element in adipocytes and pre- |
| | | | adipocytes |
| 119 | HOAAC90 | 423 | Biological Activity No. 21: Activation of transcription through CD28 response element in immune cells |
| | | | (such as T-cells). |
| 119 | HOAAC90 | 423 | Biological Activity No. 40: Activation of transcription through NFKB response element in immune cells |
| | | | (such as T-cells). |
| 120 | HOCNF19 | 424 | Biological Activity No. 3: Activation of Adipocyte ERK Signaling Pathway |
| 120 | HOCNF19 | 424 | Biological Activity No. 66: Production of IL-4 |
| 121 | HODDW40 | 425 | Biological Activity No. 51: Glucose Production in H4IIE |
| 121 | HODDW40 | 425 | Biological Activity No. 72: Production of MIP1alpha |
| 121 | HODDW40 | 425 | Biological Activity No. 80: Regulation of apoptosis of immune cells (such as mast cells). |
| 122 | HODFN71 | 426 | Biological Activity No. 21: Activation of transcription through CD28 response element in immune cells |
| | | | (such as T-cells). |
| 122 | HODFN71 | 426 | Biological Activity No. 30: Activation of transcription through NFAT response element in immune cells |
| | | | (such as natural killer cells). |
| 122 | HODFN71 | 426 | Biological Activity No. 40: Activation of transcription through NFKB response element in immune cells |
| | | | (such as T-cells). |
| 122 | HODFN71 | 426 | Biological Activity No. 42: Activation of transcription through serum response element in immune cells |
| | | | (such as natural killer cells). |
| 122 | HODFN71 | 426 | Biological Activity No. 43: Activation of transcription through serum response element in immune cells |
| | | | (such as T-cells). |
| 122 | HODFN71 | 426 | Biological Activity No. 57: Inhibition of squalene synthetase gene transcription. |
| 123 | HOEBZ89 | 427 | Biological Activity No. 57: Inhibition of squalene synthetase gene transcription. |
| 123 | HOEBZ89 | 427 | Biological Activity No. 63: Production of IFNgamma using a T cells |
| 123 | HOEBZ89 | 427 | Biological Activity No. 66: Production of IL-4 |
| 123 | HOEBZ89 | 427 | Biological Activity No. 77: Proliferation of pre-adipose cells (such as 3T3-L1 cells) |
| 124 | HOEDB32 | 428 | Biological Activity No. 42: Activation of transcription through serum response element in immune cells |
| | | | (such as natural killer cells). |
| 124 | HOEDB32 | 428 | Biological Activity No. 47: Activation of transcription through STAT6 response element in immune cells |
| | | | (such as T-cells). |
| 124 | HOEDB32 | 428 | Biological Activity No. 72: Production of MIP1alpha |
| 124 | HOEDB32 | 428 | Biological Activity No. 75: Production of TNF alpha by dendritic cells |
| 125 | HOEDH84 | 429 | Biological Activity No. 47: Activation of transcription through STAT6 response element in immune cells |
| | | | (such as T-cells). |
| 126 | HOFNC14 | 430 | Biological Activity No. 8: Activation of JNK Signaling Pathway in immune cells (such as eosinophils). |
| 127 | HOFND85 | 431 | Biological Activity No. 40: Activation of transcription through NFKB response element in immune cells |
| | | | (such as T-cells). |
| 128 | HOFOC33 | 432 | Biological Activity No. 37: Activation of transcription through NFKB response element in immune cells |
| | | | (such as natural killer cells). |
| 129 | HOGCK20 | 433 | Biological Activity No. 57: Inhibition of squalene synthetase gene transcription. |
| 129 | HOGCK20 | 433 | Biological Activity No. 80: Regulation of apoptosis of immune cells (such as mast cells). |
| 130 | HOGCS52 | 434 | Biological Activity No. 40: Activation of transcription through NFKB response element in immune cells |
| | | | (such as T-cells). |
| 130 | HOGCS52 | 434 | Biological Activity No. 74: Production of RANTES in endothelial cells (such as human umbilical vein |
| | | | endothelial cells (HUVEC)) |
| 131 | HOUCQ17 | 435 | Biological Activity No. 3: Activation of Adipocyte ERK Signaling Pathway |
| 131 | HOUCQ17 | 435 | Biological Activity No. 27: Activation of transcription through GATA-3 response element in immune cells |
| | | | (such as mast cells). |
| 131 | HOUCQ17 | 435 | Biological Activity No. 29: Activation of transcription through NFAT response element in immune cells |
| | | | (such as mast cells). |
| 131 | HOUCQ17 | 435 | Biological Activity No. 74: Production of RANTES in endothelial cells (such as human umbilical vein |
| | | | endothelial cells (HUVEC)) |
| 131 | HOUCQ17 | 435 | Biological Activity No. 77: Proliferation of pre-adipose cells (such as 3T3-L1 cells) |
| 131 | HOUCQ17 | 435 | Biological Activity No. 81: Regulation of proliferation and/or differentiation in immune cells (such as mast |
| | | | cells). |
| 132 | HOUDK26 | 436 | Biological Activity No. 47: Activation of transcription through STAT6 response element in immune cells |
| | | | (such as T-cells). |
| 134 | HPJBK12 | 438 | Biological Activity No. 6: Activation of Endothelial Cell p38 or JNK Signaling Pathway. |
| 134 | HPJBK12 | 438 | Biological Activity No. 59: Insulin Secretion |
| 134 | HPJBK12 | 438 | Biological Activity No. 80: Regulation of apoptosis of immune cells (such as mast cells). |
| 136 | HPMAI22 | 440 | Biological Activity No. 16: Activation of transcription through cAMP response element (CRE) in pre- |
| | | | adipocytes. |
| 136 | HPMAI22 | 440 | Biological Activity No. 39: Activation of transcription through NFKB response element in immune cells |
| | | | (such as T-cells). |
| 137 | HPRBC80 | 441 | Biological Activity No. 15: Activation of transcription through AP1 response element in immune cells |
| | | | (such as T-cells). |
| 137 | HPRBC80 | 441 | Biological Activity No. 27: Activation of transcription through GATA-3 response element in immune cells |
| | | | (such as mast cells). |
| 137 | HPRBC80 | 441 | Biological Activity No. 29: Activation of transcription through NFAT response element in immune cells |
| | | | (such as mast cells). |
| 137 | HPRBC80 | 441 | Biological Activity No. 30: Activation of transcription through NFAT response element in immune cells |
| | | | (such as natural killer cells). |
| 137 | HPRBC80 | 441 | Biological Activity No. 31: Activation of transcription through NFAT response element in immune cells |
| | | | (such as T-cells). |
| 137 | HPRBC80 | 441 | Biological Activity No. 40: Activation of transcription through NFKB response element in immune cells |
| | | | (such as T-cells). |
| 137 | HPRBC80 | 441 | Biological Activity No. 42: Activation of transcription through serum response element in immune cells |
| | | | (such as natural killer cells). |
| 138 | HPRSB76 | 442 | Biological Activity No. 64: Production of IL-10 and activation of T-cells. |
| 139 | HPWAY46 | 443 | Biological Activity No. 20: Activation of transcription through CD28 response element in immune cells |
| | | | (such as T-cells). |
| 139 | HPWAY46 | 443 | Biological Activity No. 25: Activation of transcription through GAS response element in immune cells |
| | | | (such as T-cells). |
| 139 | HPWAY46 | 443 | Biological Activity No. 27: Activation of transcription through GATA-3 response element in immune cells |
| | | | (such as mast cells). |
| 139 | HPWAY46 | 443 | Biological Activity No. 29: Activation of transcription through NFAT response element in immune cells |
| | | | (such as mast cells). |
| 139 | HPWAY46 | 443 | Biological Activity No. 47: Activation of transcription through STAT6 response element in immune cells |
| | | | (such as T-cells). |
| 140 | HPWAZ95 | 444 | Biological Activity No. 64: Production of IL-10 and activation of T-cells. |
| 141 | HRACD15 | 445 | Biological Activity No. 11: Activation of T-Cell p38 or JNK Signaling Pathway. |
| 141 | HRACD15 | 445 | Biological Activity No. 80: Regulation of apoptosis of immune cells (such as mast cells). |
| 141 | HRACD15 | 445 | Biological Activity No. 83: Regulation of transcription of Malic Enzyme in hepatocytes |
| 142 | HRDFD27 | 446 | Biological Activity No. 6: Activation of Endothelial Cell p38 or JNK Signaling Pathway. |
| 142 | HRDFD27 | 446 | Biological Activity No. 37: Activation of transcription through NFKB response element in immune cells |
| | | | (such as natural killer cells). |
| 142 | HRDFD27 | 446 | Biological Activity No. 44: Activation of transcription through serum response element in immune cells |
| | | | (such as T-cells). |
| 143 | HSAVD46 | 447 | Biological Activity No. 64: Production of IL-10 and activation of T-cells. |
| 144 | HSAWZ41 | 448 | Biological Activity No. 14: Activation of transcription through AP1 response element in immune cells |
| | | | (such as T-cells). |
| 144 | HSAWZ41 | 448 | Biological Activity No. 16: Activation of transcription through cAMP response element (CRE) in pre- |
| | | | adipocytes. |
| 144 | HSAWZ41 | 448 | Biological Activity No. 25: Activation of transcription through GAS response element in immune cells |
| | | | (such as T-cells). |
| 144 | HSAWZ41 | 448 | Biological Activity No. 27: Activation of transcription through GATA-3 response element in immune cells |
| | | | (such as mast cells). |
| 144 | HSAWZ41 | 448 | Biological Activity No. 29: Activation of transcription through NFAT response element in immune cells |
| | | | (such as mast cells). |
| 144 | HSAWZ41 | 448 | Biological Activity No. 35: Activation of transcription through NFKB response element in immune cells |
| | | | (such as EOL1 cells). |
| 144 | HSAWZ41 | 448 | Biological Activity No. 42: Activation of transcription through serum response element in immune cells |
| | | | (such as natural killer cells). |
| 144 | HSAWZ41 | 448 | Biological Activity No. 47: Activation of transcription through STAT6 response element in immune cells |
| | | | (such as T-cells). |
| 145 | HSAYM40 | 449 | Biological Activity No. 47: Activation of transcription through STAT6 response element in immune cells |
| | | | (such as T-cells). |
| 145 | HSAYM40 | 449 | Biological Activity No. 68: Production of IL-6 |
| 146 | HSDEZ20 | 450 | Biological Activity No. 8: Activation of JNK Signaling Pathway in immune cells (such as eosinophils). |
| 146 | HSDEZ20 | 450 | Biological Activity No. 56: Inhibition of adipocyte ERK signaling pathway. |
| 147 | HSDJA15 | 451 | Biological Activity No. 4: Activation of Adipocyte PI3 Kinase Signaling Pathway. |
| 147 | HSDJA15 | 451 | Biological Activity No. 27: Activation of transcription through GATA-3 response element in immune cells |
| | | | (such as mast cells). |
| 147 | HSDJA15 | 451 | Biological Activity No. 44: Activation of transcription through serum response element in immune cells |
| | | | (such as T-cells). |
| 147 | HSDJA15 | 451 | Biological Activity No. 67: Production of IL-5 |
| 148 | HSDSB09 | 452 | Biological Activity No. 16: Activation of transcription through cAMP response element (CRE) in pre- |
| | | | adipocytes. |
| 148 | HSDSB09 | 452 | Biological Activity No. 27: Activation of transcription through GATA-3 response element in immune cells |
| | | | (such as mast cells). |
| 148 | HSDSB09 | 452 | Biological Activity No. 29: Activation of transcription through NFAT response element in immune cells |
| | | | (such as mast cells). |
| 148 | HSDSB09 | 452 | Biological Activity No. 34: Activation of transcription through NFKB response element in immune cells |
| | | | (such as basophils). |
| 148 | HSDSB09 | 452 | Biological Activity No. 36: Activation of transcription through NFKB response element in immune cells |
| | | | (such as mast cells). |
| 148 | HSDSB09 | 452 | Biological Activity No. 42: Activation of transcription through serum response element in immune cells |
| | | | (such as natural killer cells). |
| 148 | HSDSB09 | 452 | Biological Activity No. 44: Activation of transcription through serum response element in immune cells |
| | | | (such as T-cells). |
| 148 | HSDSB09 | 452 | Biological Activity No. 45: Activation of transcription through serum response element in pre-adipocytes. |
| 148 | HSDSB09 | 452 | Biological Activity No. 46: Activation of transcription through STAT6 response element in immune cells |
| | | | (such as mast cells). |
| 148 | HSDSB09 | 452 | Biological Activity No. 47: Activation of transcription through STAT6 response element in immune cells |
| | | | (such as T-cells). |
| 148 | HSDSB09 | 452 | Biological Activity No. 82: Regulation of transcription of Malic Enzyme in adipocytes |
| 148 | HSDSB09 | 452 | Biological Activity No. 86: Regulation of transcription via DMEFI response element in adipocytes and pre- |
| | | | adipocytes |
| 148 | HSDSB09 | 452 | Biological Activity No. 95: Stimulation of Calcium Flux in pancreatic beta cells. |
| 148 | HSDSB09 | 452 | Biological Activity No. 96: Stimulation of insulin secretion from pancreatic beta cells. |
| 149 | HSFAM31 | 453 | Biological Activity No. 64: Production of IL-10 and activation of T-cells. |
| 150 | HSHAX21 | 454 | Biological Activity No. 3: Activation of Adipocyte ERK Signaling Pathway |
| 150 | HSHAX21 | 454 | Biological Activity No. 39: Activation of transcription through NFKB response element in immune cells |
| | | | (such as T-cells). |
| 150 | HSHAX21 | 454 | Biological Activity No. 72: Production of MIP1 alpha |
| 150 | HSHAX21 | 454 | Biological Activity No. 75: Production of TNF alpha by dendritic cells |
| 151 | HSQCM10 | 455 | Biological Activity No. 64: Production of IL-10 and activation of T-cells. |
| 151 | HSQCM10 | 455 | Biological Activity No. 88: Regulation of viability or proliferation of immune cells (such as human |
| | | | eosinophil EOL-1 cells). |
| 152 | HSSGD52 | 456 | Biological Activity No. 27: Activation of transcription through GATA-3 response element in immune cells |
| | | | (such as mast cells). |
| 152 | HSSGD52 | 456 | Biological Activity No. 29: Activation of transcription through NFAT response element in immune cells |
| | | | (such as mast cells). |
| 152 | HSSGD52 | 456 | Biological Activity No. 42: Activation of transcription through serum response element in immune cells |
| | | | (such as natural killer cells). |
| 152 | HSSGD52 | 456 | Biological Activity No. 47: Activation of transcription through STAT6 response element in immune cells |
| | | | (such as T-cells). |
| 152 | HSSGD52 | 456 | Biological Activity No. 77: Proliferation of pre-adipose cells (such as 3T3-L1 cells) |
| 153 | HSSJC35 | 457 | Biological Activity No. 80: Regulation of apoptosis of immune cells (such as mast cells). |
| 154 | HSXEC75 | 458 | Biological Activity No. 64: Production of IL-10 and activation of T-cells. |
| 155 | HSYAZ50 | 459 | Biological Activity No. 40: Activation of transcription through NFKB response element in immune cells |
| | | | (such as T-cells). |
| 155 | HSYAZ50 | 459 | Biological Activity No. 77: Proliferation of pre-adipose cells (such as 3T3-L1 cells) |
| 156 | HSYBG37 | 460 | Biological Activity No. 3: Activation of Adipocyte ERK Signaling Pathway |
| 156 | HSYBG37 | 460 | Biological Activity No. 8: Activation of JNK Signal Pathway in immune cells (such as eosinophils). |
| 157 | HSZAF47 | 461 | Biological Activity No. 8: Activation of JNK Signaling Pathway in immune cells (such as eosinophils). |
| 158 | HTADX17 | 462 | Biological Activity No. 24: Activation of transcription through GAS response element in immune cells |
| | | | (such as T-cells). |
| 158 | HTADX17 | 462 | Biological Activity No. 32: Activation of transcription through NFAT response in immune cells (such as T- |
| | | | cells). |
| 158 | HTADX17 | 462 | Biological Activity No. 39: Activation of transcription through NFKB response element in immune cells |
| | | | (such as T-cells). |
| 159 | HTEAF65 | 463 | Biological Activity No. 47: Activation of transcription through STAT6 response element in immune cells |
| | | | (such as T-cells). |
| 160 | HTEBI28 | 464 | Biological Activity No. 67: Production of IL-5 |
| 161 | HTEHR24 | 465 | Biological Activity No. 66: Production of IL-4 |
| 162 | HTEHU31 | 466 | Biological Activity No. 64: Production of IL-10 and activation of T-cells. |
| 163 | HTEHU93 | 467 | Biological Activity No. 29: Activation of transcription through NFAT response element in immune cells |
| | | | (such as mast cells). |
| 163 | HTEHU93 | 467 | Biological Activity No. 64: Production of IL-10 and activation of T-cells. |
| 164 | HTEIP36 | 468 | Biological Activity No. 39: Activation of transcription through NFKB response element in immune cells |
| | | | (such as T-cells). |
| 164 | HTEIP36 | 468 | Biological Activity No. 64: Production of IL-10 and activation of T-cells. |
| 165 | HTEIV80 | 469 | Biological Activity No. 39: Activation of transcription through NFKB response element in immune cells |
| | | | (such as T-cells). |
| 166 | HTEPG70 | 470 | Biological Activity No. 16: Activation of transcription through cAMP response element (CRE) in pre- |
| | | | adipocytes. |
| 166 | HTEPG70 | 470 | Biological Activity No. 27: Activation of transcription through GATA-3 response element in immune cells |
| | | | (such as mast cells). |
| 166 | HTEPG70 | 470 | Biological Activity No. 29: Activation of transcription through NFAT response element in immune cells |
| | | | (such as mast cells). |
| 166 | HTEPG70 | 470 | Biological Activity No. 34: Activation of transcription through NFKB response element in immune cells |
| | | | (such as basophils). |
| 166 | HTEPG70 | 470 | Biological Activity No. 40: Activation of transcription through NFKB response element in immune cells |
| | | | (such as T-cells). |
| 166 | HTEPG70 | 470 | Biological Activity No. 42: Activation of transcription through serum response element in immune cells |
| | | | (such as natural killer cells). |
| 166 | HTEPG70 | 470 | Biological Activity No. 45: Activation of transcription through serum response element in pre-adipocytes. |
| 167 | HTHBG43 | 471 | Biological Activity No. 42: Activation of transcription through serum response element in immune cells |
| | | | (such as natural killer cells). |
| 167 | HTHBG43 | 471 | Biological Activity No. 47: Activation of transcription through STAT6 response element in immune cells |
| | | | (such as T-cells). |
| 168 | HTJMA95 | 472 | Biological Activity No. 8: Activation of JNK Signaling Pathway in immune cells (such as eosinophils). |
| 168 | HTJMA95 | 472 | Biological Activity No. 15: Activation of transcription through AP1 response element in immune cells |
| | | | (such as T-cells). |
| 168 | HTJMA95 | 472 | Biological Activity No. 16: Activation of transcription through cAMP response element (CRE) in pre- |
| | | | adipocytes. |
| 168 | HTJMA95 | 472 | Biological Activity No. 21: Activation of transcription through CD28 response element in immune cells |
| | | | (such as T-cells). |
| 168 | HTJMA95 | 472 | Biological Activity No. 31: Activation of transcription through NFAT response element in immune cells |
| | | | (such as T-cells). |
| 168 | HTJMA95 | 472 | Biological Activity No. 40: Activation of transcription through NFKB response element in immune cells |
| | | | (such as T-cells). |
| 168 | HTJMA95 | 472 | Biological Activity No. 57: Inhibition of squalene synthetase gene transcription. |
| 168 | HTJMA95 | 472 | Biological Activity No. 64: Production of IL-10 and activation of T-cells. |
| 169 | HTLFE42 | 473 | Biological Activity No. 47: Activation of transcription through STAT6 response element in immune cells |
| | | | (such as T-cells). |
| 170 | HTLIT32 | 474 | Biological Activity No. 66: Production of IL-4 |
| 171 | HTLIV19 | 475 | Biological Activity No. 30: Activation of transcription through NFAT response element in immune cells |
| | | | (such as natural killer cells). |
| 171 | HTLIV19 | 475 | Biological Activity No. 42: Activation of transcription through serum response element in immune cells |
| | | | (such as natural killer cells). |
| 172 | HTOAK16 | 476 | Biological Activity No. 61: Production of ICAM in endothelial cells (such as human umbilical vein |
| | | | endothelial cells (HUVEC)) |
| 172 | HTOAK16 | 476 | Biological Activity No. 69: Production of IL-8 by by endothelial cells (such as Human Umbilical Cord |
| | | | Endothelial Cells). |
| 172 | HTOAK16 | 476 | Biological Activity No. 76: Production of VCAM in endothelial cells (such as human umbilical vein |
| | | | endothelial cells (HUVEC)) |
| 173 | HTOHD42 | 477 | Biological Activity No. 64: Production of IL-10 and activation of T-cells. |
| 174 | HTOHM15 | 478 | Biological Activity No. 8: Activation of JNK Signaling Pathway in immune cells (such as eosinophils). |
| 175 | HTPBW79 | 479 | Biological Activity No. 15: Activation of transcription through AP1 response element in immune cells |
| | | | (such as T-cells). |
| 175 | HTPBW79 | 479 | Biological Activity No. 21: Activation of transcription through CD28 response element in immune cells |
| | | | (such as T-cells). |
| 175 | HTPBW79 | 479 | Biological Activity No. 29: Activation of transcription through NFAT response element in immune cells |
| | | | (such as mast cells). |
| 175 | HTPBW79 | 479 | Biological Activity No. 31: Activation of transcription through NFAT response element in immune cells |
| | | | (such as T-cells). |
| 175 | HTPBW79 | 479 | Biological Activity No. 40: Activation of transcription through NFKB response element in immune cells |
| | | | (such as T-cells). |
| 176 | HTTDB46 | 480 | Biological Activity No. 1: Activation of transcription through NFKB response element in immune cells |
| | | | (such as B-cells). |
| 176 | HTTDB46 | 480 | Biological Activity No. 55: IL-6 in HUVEC |
| 176 | HTTDB46 | 480 | Biological Activity No. 66: Production of IL-4 |
| 177 | HTXCV12 | 481 | Biological Activity No. 39: Activation of transcription through NFKB response element in immune cells |
| | | | (such as T-cells). |
| 177 | HTXCV12 | 481 | Biological Activity No. 44: Activation of transcription through serum response element in immune cells |
| | | | (such as T-cells). |
| 177 | HTXCV12 | 481 | Biological Activity No. 74: Production of RANTES in endothelial cells (such as human umbilical vein |
| | | | endothelial cells (HUVEC)) |
| 178 | HTXDW56 | 482 | Biological Activity No. 2: Activation of transcription through NFKB response element in neuronal cells |
| | | | (such as SKNMC cells). |
| 178 | HTXDW56 | 482 | Biological Activity No. 24: Activation of transcription through GAS response element in immune cells |
| | | | (such as T-cells). |
| 178 | HTXDW56 | 482 | Biological Activity No. 25: Activation of transcription through GAS response element in immune cells |
| | | | (such as T-cells). |
| 178 | HTXDW56 | 482 | Biological Activity No. 32: Activation of transcription through NFAT response in immune cells (such as T- |
| | | | cells). |
| 178 | HTXDW56 | 482 | Biological Activity No. 39: Activation of transcription through NFKB response element in immune cells |
| | | | such as T-cells). |
| 179 | HTXFL30 | 483 | Biological Activity No. 57: Inhibition of squalene synthetase gene transcription. |
| 179 | HTXFL30 | 483 | Biological Activity No. 75: Production of TNF alpha by dendritic cells |
| 179 | HTXFL30 | 483 | Biological Activity No. 81: Regulation of proliferation and/or differentiation in immune cells (such as mast |
| | | | cells). |
| 180 | HTXKP61 | 484 | Biological Activity No. 39: Activation of transcription through NFKB response element in immune cells |
| | | | (such as T-cells). |
| 181 | HUKAH51 | 485 | Biological Activity No. 8: Activation of JNK Signaling Pathway in immune cells (such as eosinophils). |
| 181 | HUKAH51 | 485 | Biological Activity No. 78: Protection from Endothelial Cell Apoptosis. |
| 182 | HUKBT29 | 486 | Biological Activity No. 64: Production of IL-10 and activation of T-cells. |
| 182 | HUKBT29 | 486 | Biological Activity No. 66: Production of IL-4 |
| 182 | HUKBT29 | 486 | Biological Activity No. 75: Production of TNF alpha by dendritic cells |
| 183 | HUSBA88 | 487 | Biological Activity No. 77: Proliferation of pre-adipose cells (such as 3T3-L1 cells) |
| 184 | HWBAR88 | 488 | Biological Activity No. 8: Activation of JNK Signaling Pathway in immune cells (such as eosinophils). |
| 184 | HWBAR88 | 488 | Biological Activity No. 70: Production of IL-8 by immune cells (such as the human EOL-1 eosinophil |
| | | | cells) |
| 185 | HWBCB89 | 489 | Biological Activity No. 27: Activation of transcription through GATA-3 response element in immune cells |
| | | | (such as mast cells). |
| 185 | HWBCB89 | 489 | Biological Activity No. 39: Activation of transcription through NFKB response element in immune cells |
| | | | (such as T-cells). |
| 185 | HWBCB89 | 489 | Biological Activity No. 42: Activation of transcription through serum response element in immune cells |
| | | | (such as natural killer cells). |
| 185 | HWBCB89 | 489 | Biological Activity No. 44: Activation of transcription through serum response element in immune cells |
| | | | (such as T-cells). |
| 185 | HWBCB89 | 489 | Biological Activity No. 62: Production of ICAM-1 |
| 186 | HWBCP79 | 490 | Biological Activity No. 3: Activation of Adipocyte ERK Signaling Pathway |
| 186 | HWBCP79 | 490 | Biological Activity No. 64: Production of IL-10 and activation of T-cells. |
| 187 | HWHGP71 | 491 | Biological Activity No. 47: Activation of transcription through STAT6 response element in immune cells |
| | | | (such as T-cells). |
| 188 | HWHQS55 | 492 | Biological Activity No. 57: Inhibition of squalene synthetase gene transcription. |
| 188 | HWHQS55 | 492 | Biological Activity No. 65: Production of IL-13 and activation of T-cells. |
| 189 | HWLEV32 | 493 | Biological Activity No. 66: Production of IL-4 |
| 190 | HYBAR01 | 494 | Biological Activity No. 64: Production of IL-10 and activation of T-cells. |
| 190 | HYBAR01 | 494 | Biological Activity No. 71: Production of MCP-1 |
| 191 | HYBBE75 | 495 | Biological Activity No. 64: Production of IL-10 and activation of T-cells. |
| 192 | HAPSA79 | 496 | Biological Activity No. 8: Activation of JNK Signaling Pathway in immune cells (such as eosinophils). |
| 193 | HDPJM30 | 497 | Biological Activity No. 58: Inhibition of transcription through NFKB response element in immune cells |
| | | | (such as basophils). |
| 193 | HDPJM30 | 497 | Biological Activity No. 71: Production of MCP-1 |
| 193 | HDPJM30 | 497 | Biological Activity No. 84: Regulation of transcription through the FAS promoter element in hepatocytes |
| 194 | HHFGR93 | 498 | Biological Activity No. 33: Activation of transcription through NFKB response element in epithelial cells |
| | | | (such as HELA cells). |
| 194 | HHFGR93 | 498 | Biological Activity No. 49: Calcium flux in immune cells (such as monocytes) |
| 194 | HHFGR93 | 498 | Biological Activity No. 71: Production of MCP-1 |
| 194 | HHFGR93 | 498 | Biological Activity No. 73: Production of RANTES in bronchial epithelium cells |
| 195 | HJBAV55 | 499 | Biological Activity No. 58: Inhibition of transcription through NFKB response element in immune cells |
| | | | (such as basophils). |
| 195 | HJBAV55 | 499 | Biological Activity No. 72: Production of MIP1alpha+TZ,1/59 |

[0099] TABLE 1D.2

| Bio- | | | |
|---|---|---|---|
| logical | | | |
| Activity | | | |
| No. | Biological Activity | Exemplary Activity Assay | Preferred Indication |
| 1 | Activation of transcription | Assays for the activation of transcription through the NFKB response element are well- | Preferred embodiments of the invention include using polypeptides of the |
| | through NFKB response | known in the art and may be used or routinely modified to assess the ability of | invention (or antibodies, agonists, or antagonists thereof) in detection, |
| | element in immune cells | polypeptides of the invention (including antibodies and agonists or antagonists of the | diagnosis, prevention, and/or treatment of Cancer, Autoimmunity, Allergy and |
| | (such as B-cells). | invention) to regulate NFKB transcription factors and modulate expression of | Asthma |
| | | immunomodulatory genes. Exemplary assays for transcription through the NFKB | |
| | | response element that may be used or rountinely modified to test NFKB-response element | |
| | | activity of polypeptides of the invention (including antibodies and agonists or antagonists | |
| | | of the invention) include assays disclosed in: Gri G, et al., Biol Chem, 273(11): 6431-6438 | |
| | | (1998); Pyatt DW, et al., Cell Biol Toxicol 2000; 16(1): 41-51 (2000); Berger et al., Gene | |
| | | 66: 1-10 (1998); Cullen and Malm, Methods in Enzymol 216: 362-368 (1992); Henthorn et | |
| | | al., Proc Natl Acad Sci USA 85: 6342-6346 (1988); Valle Blazquez et al, Immunology | |
| | | 90(3): 455-460 (1997); Aramburau et al., J Exp Med 82(3): 801-810 (1995); and Fraser et | |
| | | al., 29(3): 838-844 (1999), the contents of each of which are herein incorporated by | |
| | | reference in its entirety. Immune cells that may be used according to these assays are | |
| | | publicly available (e.g., through the ATCC ™). Exemplary immune cells that may be used | |
| | | according to these assays include the Reh B-cell line. | |
| 2 | Activation of transcription | Assays for the activation of transcription through the NFKB response element are well- | Preferred embodiments of the invention include using polypeptides of the |
| | through NFKB response | known in the art and may be used or routinely modified to assess the ability of | invention (or antibodies, agonists, or antagonists thereof) in detection, |
| | element in neuronal cells | polypeptides of the invention (including antibodies and agonists or antagonists of the | diagnosis, prevention, and/or treatment of Neurological Diseases and |
| | (such as SKNMC cells). | invention) to regulate NFKB transcription factors and modulate expression of neuronal | Disorders (e.g. Alzheimer''s Disease, Parkinson''s Disease, Brain Cancer, |
| | | genes. Exemplary assays for transcription through the NFKB response element that may | Seizures). |
| | | be used or routinely modified to test NFKB-response element activity of polypeptides of | |
| | | the invention (including antibodies and agonists or antagonists of the invention) include | |
| | | assays disclosed in: Gill JS, et al., Neurobiol Dis, 7(4): 448-461 (2000); Tamatani M, et | |
| | | al., J Biol Chem, 274(13): 8531-8538 (1999); Berger et al., Gene 66: 1-10 (1998); Cullen | |
| | | and Malm, Methods in Enzymol 216: 362-368 (1992); Henthorn et al., Proc Natl Acad Sci | |
| | | USA 85: 6342-6346 (1988); Valle Blazquez et al, Immunology 90(3): 455-460 (1997); | |
| | | Aramburau et al., J Exp Med 82(3): 801-810 (1995); and Fraser et al., 29(3): 838-844 | |
| | | (1999), the contents of each of which are herein incorporated by reference in its entirety. | |
| | | Neuronal cells that may be used according to these assays are publicly available (e.g., | |
| | | through the ATCC ™). Exemplary neuronal cells that may be used according to these | |
| | | assays include the SKNMC neuronal cell line. | |
| 3 | Activation of Adipocyte ERK | Kinase assay. Kinase assays, for example an Elk-1 kinase assay, for ERK signal | A highly preferred embodiment of the invention includes a method for |
| | Signaling Pathway | transduction that regulate cell proliferation or differentiation are well known in the art and | stimulating adipocyte proliferation. An alterative highly preferred |
| | | may be used or routinely modified to assess the ability of polypeptides of the invention | embodiment of the invention includes a method for inhibiting adipocyte |
| | | (including antibodies and agonists or antagonists of the invention) to promote or inhibit | proliferation. A highly preferred embodiment of the invention includes a |
| | | cell proliferation, activation, and differentiation. Exemplary assays for ERK kinase | method for stimulating adipocyte differentiation. An alternative highly |
| | | activity that may be used or routinely modified to test ERK kinase-induced activity of | preferred embodiment of the invention includes a method for inhibiting |
| | | polypeptides of the invention (including antibodies and agonists or antagonists of the | adipocyte differentiation. A highly preferred embodiment of the invention |
| | | invention) include the assays disclosed in Forrer et al., Biol Chem 379(8-9): 1101-1110 | includes a method for stimulating (e.g., increasing) adipocyte activation. An |
| | | (1998); Le Marchand-Brustel Y, Exp Clin Endocrinol Diabetes 107(2): 126-132 (1999); | alternative highly preferred embodiment of the invention includes a method |
| | | Kyriakis JM, Biochem Soc Symp 64: 29-48 (1999); Chang and Karin, Nature | for inhibiting the activation of (e.g., decreasing) and/or inactivating |
| | | 410(6824): 37-40 (2001); and Cobb MH, Prog Biophys Mol Biol 71(3-4): 479-500 (1999); | adipocytes. Highly preferred indications include endocrine disorders |
| | | the contents of each of which are herein incorporated by reference in its entirety. Mouse | (e.g., as described below under “Endocrine Disorders”). Highly preferred |
| | | adipocyte cells that may be used according to these assays are publicly available (e.g., | indications also include neoplastic diseases (e.g., lipomas, liposarcomas, |
| | | through the ATCC ™). Exemplary mouse adipocyte cells that may be used according to | and/or as described below under “Hyperproliferative Disorders”). Preferred |
| | | these assays include 3T3-L1 cells. 3T3-L1 is an adherent mouse preadipocyte cell line that | indications include blood disorders (e.g., hypertension, congestive heart |
| | | is a continuous substrain of 3T3 fibroblast cells developed through clonal isolation and | failure, blood vessel blockage, heart disease, stroke, impotence and/or as |
| | | undergo a pre-adipocyte to adipose-like conversion under appropriate differentiation | described below under “Immune Activity”, “Cardiovascular Disorders”, |
| | | conditions known in the art. | and/or “Blood-Related Disorders”), immune disorders (e.g., as described |
| | | | below under “Immune Activity”), neural disorders (e.g., as described below |
| | | | under “Neural Activity and Neurological Diseases”), and infection (e.g., as |
| | | | described below under “Infectious Disease”). A highly preferred |
| | | | indication is diabetes mellitus. An additional highly preferred indication |
| | | | is a complication associated with diabetes (e.g., diabetic retinopathy, diabetic |
| | | | nephropathy, kidney disease (e.g., renal failure, nephropathy and/or other |
| | | | diseases and disorders as described in the “Renal Disorders” section below), |
| | | | diabetic neuropathy, nerve disease and nerve damage (e.g., due to diabetic |
| | | | neuropathy), blood vessel blockage, heart disease, stroke, impotence (e.g., due |
| | | | to diabetic neuropathy or blood vessel blockage), seizures, mental confusion, |
| | | | drowsiness, nonketotic hyperglycemic-hyperosmolar coma, cardiovascular |
| | | | disease (e.g., heart disease, atherosclerosis, microvascular disease, |
| | | | hypertension, stroke, and other diseases and disorders as described in the |
| | | | “Cardiovascular Disorders” section below), dyslipidemia, endocrine disorders |
| | | | (as described in the “Endocrine Disorders” section below), neuropathy, vision |
| | | | impairment (e.g., diabetic retinopathy and blindness), ulcers and impaired |
| | | | wound healing, infection (e.g., infectious diseases and disorders as described |
| | | | in the “Infectious Diseases” section below (particularly of the urinary tract and |
| | | | skin). An additional highly preferred indication is obesity and/or |
| | | | complications associated with obesity. Additional highly preferred indications |
| | | | include weight loss or alternatively, weight gain. Additional highly |
| | | | preferred indications are complications associated with insulin resistance. |
| | | | Additional highly preferred indications are disorders of the musculoskeletal |
| | | | systems including myopathies, muscular dystrophy, and/or as described |
| | | | herein. Additional highly preferred indications include, hypertension, |
| | | | coronary artery disease, dyslipidemia, gallstones, osteoarthritis, degenerative |
| | | | arthritis, eating disorders, fibrosis, cachexia, and kidney diseases or disorders. |
| | | | Preferred indications include neoplasms and cancer, such as, lymphoma, |
| | | | leukemia and breast, colon, and kidney cancer. Additional preferred |
| | | | indications include melanoma, prostate, lung, pancreatic, esophageal, |
| | | | stomach, brain, liver, and urinary cancer. Highly preferred indications include |
| | | | lipomas and liposarcomas. Other preferred indications include benign |
| | | | dysproliferative disorders and pre-neoplastic conditions, such as, for example, |
| | | | hyperplasia, metaplasia, and/or dysplasia. |
| 4 | Activation of Adipocyte PI3 | Kinase assay. Kinase assays, for example an GSK-3 assays, for PI3 kinase signal | A highly preferred embodiment of the invention includes a method for |
| | Kinase Signalling Pathway | transduction that regulate glucose metabolism and cell survival are well-known in the art | increasing adipocyte survival An alternative highly preferred embodiment of |
| | | and may be used or routinely modified to assess the ability of polypeptides of the invention | the invention includes a method for decreasing adipocyte survival. A |
| | | (including antibodies and agonists or antagonists of the invention) to promote or inhibit | preferred embodiment of the invention includes a method for stimulating |
| | | glucose metabolism and cell survival. Exemplary assays for PI3 kinase activity that may | adipocyte proliferation. An alternative highly preferred embodiment of the |
| | | be used or routinely modified to test PI3 kinase-induced activity of polypeptides of the | invention includes a method for inhibiting adipocyte proliferation. A |
| | | invention (including antibodies and agonists or antagonists of the invention) include assays | preferred embodiment of the invention includes a method for stimulating |
| | | disclosed in Forrer et al., Biol Chem 379(8-9): 1101-1110 (1998); Nikoulina et al., | adipocyte differentiation. An alternative highly preferred embodiment of the |
| | | Diabetes 49(2): 263-271 (2000); and Schreyer et al., Diabetes 48(8): 1662-1666 (1999), the | invention includes a method for inhibiting adipocyte differentiation. |
| | | contents of each of which are herein incorporated by reference in its entirety. Mouse | Highly preferred indications include endocrine disorders (e.g., as described |
| | | adipocyte cells that may be used according to these assays are publicly available (e.g., | below under “Endocrine Disorders”). Preferred indications include |
| | | through the ATCC ™). Exemplary mouse adipocyte cells that may be used according to | neoplastic diseases (e.g., lipomas, liposarcomas, and/or as described below |
| | | these assays include 3T3-L1 cells. 3T3-L1 is an adherent mouse preadipocyte cell line that | under “Hyperproliferative Disorders”), blood disorders (e.g., hypertension, |
| | | is a continous substrain of 3T3 fibroblast cells developed through clonal isolation and | congestive heart failure, blood vessel blockage, heart disease, stroke, |
| | | undergo a pre-adipocyte to adipose-like conversion under appropriate differentiation | impotence and/or as described below under “Immune Activity”, |
| | | conditions known in the art. | “Cardiovascular Disorders”, and/or “Blood-Related Disorders”), immune |
| | | | disorders (e.g., as described below under “Immune Activity”), neural |
| | | | disorders (e.g., as described below under “Neural Activity and Neurological |
| | | | Diseases”), and infection (e.g., as described below under “Infectious |
| | | | Disease”). A highly preferred indication is diabetes mellitus. An |
| | | | additional highly preferred indication is a complication associated with |
| | | | diabetes (e.g., diabetic retinopathy, diabetic nephropathy, kidney disease (e.g., |
| | | | renal failure, nephropathy and/or other diseases and disorders as described in |
| | | | the “Renal Disorders” section below), diabetic neuropathy, nerve disease and |
| | | | nerve damage (e.g, due to diabetic neuropathy), blood vessel blockage, heart |
| | | | disease, stroke, impotence (e.g., due to diabetic neuropathy or blood vessel |
| | | | blockage), seizures, mental confusion, drowsiness, nonketotic hyperglycemic- |
| | | | hyperosmolar coma, cardiovascular disease (e.g., heart disease, |
| | | | atherosclerosis, microvascular disease, hypertension, stroke, and other |
| | | | diseases and disorders as described in the “Cardiovascular Disorders” section |
| | | | below), dyslipidemia, endocrine disorders (as described in the “Endocrine |
| | | | Disorders” section below), neuropathy, vision impairment (e.g., diabetic |
| | | | retinopathy and blindness), ulcers and impaired wound healing, infection (e.g., |
| | | | infectious diseases and disorders as described in the “Infectious Diseases” |
| | | | section below, especially of the urinary tract and skin), carpal tunnel |
| | | | syndrome and Dupuytren's contracture). An additional highly preferred |
| | | | indication is obesity and/or complications associated with obesity. Additional |
| | | | highly preferred indications include weight loss or alternatively, weight gain. |
| | | | Additional highly preferred indications are complications associated with |
| | | | insulin resistance. Additional highly preferred indications are |
| | | | disorders of the musculoskeletal systems including myopathies, muscular |
| | | | dystrophy, and/or as described herein. Additional highly preferred |
| | | | indications include, hypertension, coronary artery disease, dyslipidemia, |
| | | | gallstones, osteoarthritis, degenerative arthritis, eating disorders, fibrosis, |
| | | | cachexia, and kidney diseases or disorders. Highly preferred indications |
| | | | include neoplasms and cancer, such as, lipoma, liposarcoma, lymphoma, |
| | | | leukemia and breast, colon, and kidney cancer. Additional highly preferred |
| | | | indications include melanoma, prostate, lung, pancreatic, esophageal, |
| | | | stomach, brain, liver, and urinary cancer. Other preferred indications include |
| | | | benign dysproliferative disorders and pre-neoplastic conditions, such as, for |
| | | | example, hyperplasia, metaplasia, and/or dysplasia. |
| 5 | Activation of Endothelial Cell | Kinase assay. JNK kinase assays for signal transduction that regulate cell proliferation, | A highly preferred embodiment of the invention includes a method for |
| | JNK Signaling Pathway. | activation, or apoptosis are well known in the art and may be used or routinely modified to | stimulating endothelial cell growth. An alternative highly preferred |
| | | assess the ability of polypeptides of the invention (including antibodies and agonists or | embodiment of the invention includes a method for inhibiting endothelial cell |
| | | antagonists of the invention) to promote or inhibit cell proliferation, activation, and | growth. A highly preferred embodiment of the invention includes a method |
| | | apoptosis. Exemplary assays for JNK kinase activity that may be used or routinely | for stimulating endothelial cell proliferation. An alternative highly preferred |
| | | modified to test JNK kinase-induced activity of polypeptides of the invention (including | embodiment of the invention includes a method for inhibiting endothelial cell |
| | | antibodies and agonists or antagonists of the invention) include the assays disclosed in | proliferation. A highly preferred embodiment of the invention includes a |
| | | Forrer et al., Biol Chem 379(8-9): 1101-1110 (1998); Gupta et al., Exp Cell Res 247(2): | method for stimulating apoptosis of endothelial cells. An alternative highly |
| | | 495-504 (1999); Kyriakis JM, Biochem Soc Symp 64: 29-48 (1999); Chang and Karin, | preferred embodiment of the invention includes a method for inhibiting |
| | | Nature 410(6824): 37-40 (2001); and Cobb MH, Prog Biophys Mol Biol 71(3-4): 479-500 | apoptosis of endothelial cells. A highly preferred embodiment of the |
| | | (1999); the contents of each of which are herein incorporated by reference in its entirety. | invention includes a method for stimulating endothelial cell activation. An |
| | | Endothelial cells that may be used according to these assays are publicly available (e.g., | alternative highly preferred embodiment of the invention includes a method |
| | | through the ATCC ™). Exemplary endothelial cells that may be used according to these | for inhibiting the activation of and/or inactivating endothelial cells. A |
| | | assays include human umbilical vein endothelial cells (HUVEC), which are endothelial | highly preferred embodiment of the invention includes a method for |
| | | cells which line venous blood vessels, and are involved in functions that include, but are | stimulating angiogenisis. An alternative highly preferred embodiment of the |
| | | not limited to, angiogenesis, vascular permeability, vascular tone, and immune cell | invention includes a method for inhibiting angiogenesis. A highly |
| | | extravasation. | preferred embodiment of the invention includes a method for reducing cardiac |
| | | | hypertrophy. An alternative highly preferred embodiment of the invention |
| | | | include a method for inducing cardiac hypertrophy. Highly preferred |
| | | | indications include neoplastic diseases (e.g., as described below under |
| | | | “Hyperproliferative Disorders”), and disorders of the cardiovascular system |
| | | | (e.g., heart disease, congestive heart failure, hypertension, aortic stenosis, |
| | | | cardiomyopathy, valvular regurgitation, left ventricular dysfunction, |
| | | | atherosclerosis and atherosclerotic vascular disease, diabetic nephropathy, |
| | | | intracardiac shunt, cardiac hypertrophy, myocardial infarction, chronic |
| | | | hemodynamic overload, and/or as described below under “Cardiovascular |
| | | | Disorders”). Highly preferred indications include cardiovascular, endothelial |
| | | | and/or angiogenic disorders (e.g., systemic disorders that affect vessels such |
| | | | as diabetes mellitus, as well as diseases of the vessels themselves, such as of |
| | | | the arteries, capillaries, veins and/or lymphatics). Highly preferred are |
| | | | indications that stimulate angiogenesis and/or cardiovascularization. Highly |
| | | | preferred are indications that inhibit angiogenesis and/or |
| | | | cardiovascularization. Highly preferred indications include antiangiogenic |
| | | | activity to treat solid tumors, leukemias, and Kaposi''s sarcoma, and retinal |
| | | | disorders. Highly preferred indications include neoplasms and cancer, such as, |
| | | | Kaposi''s sarcoma, hemangioma (capillary and cavernous), glomus tumors, |
| | | | telangiectasia, bacillary angiomatosis, hemangioendothelioma, angiosarcoma, |
| | | | haemangiopericytoma, lymphangioma, lymphangiosarcoma. Highly |
| | | | preferred indications also include cancers such as, prostate, breast, lung, |
| | | | colon, pancreatic, esophageal, stomach, brain, liver, and urinary cancer. |
| | | | Preferred indications include benign dysproliferative disorders and pre- |
| | | | neoplastic conditions, such as, for example, hyperplasia, metaplasia, and/or |
| | | | dysplasia. Highly preferred indications also include arterial disease, such |
| | | | as, atherosclerosis, hypertension, coronary artery disease, inflammatory |
| | | | vasculitides, Reynaud''s disease and Reynaud''s phenomenom, aneurysms, |
| | | | restenosis; venous and lymphatic disorders such as thrombophlebitis, |
| | | | lymphangitis, and lymphedema; and other vascular disorders such as |
| | | | peripheral vascular disease, and cancer. Highly preferred indications also |
| | | | include trauma such as wounds, burns, and injured tissue (e.g., vascular injury |
| | | | such as, injury resulting from balloon angioplasty, and atheroschlerotic |
| | | | lesions), implant fixation, scarring, ischemia reperfusion injury, rheumatoid |
| | | | arthritis, cerebrovascular disease, renal diseases such as acute renal failure, |
| | | | and osteoporosis. Additional highly preferred indications include stroke, |
| | | | graft rejection, diabetic or other retinopathies, thrombotic and coagulative |
| | | | disorders, vascularitis, lymph angiogenesis, sexual disorders, age-related |
| | | | macular degeneration, and treatment/prevention of endometriosis and related |
| | | | conditions. Additional highly preferred indications include fibromas, heart |
| | | | disease, cardiac arrest, heart valve disease, and vascular disease. |
| | | | Preferred indications include blood disorders (e.g., as described below under |
| | | | “Immune Activity“, “Blood-Related Disorders”, and/or “Cardiovascular |
| | | | Disorders”). Preferred indications include autoimmune diseases (e.g., |
| | | | rheumatoid arthritis, systemic lupus erythematosis, multiple sclerosis and/or |
| | | | as described below) and immunodeficiencies (e.g., as described below). |
| | | | Additional preferred indications include inflammation and inflammatory |
| | | | disorders (such as acute and chronic inflammatory diseases, e.g., |
| | | | inflammatory bowel disease and Crohn's disease), and pain management. |
| 6 | Activation of Endothelial Cell | Kinase assay. JNK and p38 kinase assays for signal transduction that regulate cell | A highly preferred embodiment of the invention includes a method for |
| | p38 or JNK Signaling | proliferation, activation, or apoptosis are well known in the art and may be used or | stimulating endothelial cell growth. An alternative highly preferred |
| | Pathway. | routinely modified to assess the ability of polypeptides of the invention (including | embodiment of the invention includes a method for inhibiting endothelial cell |
| | | antibodies and agonists or antagonists of the invention) to promote or inhibit cell | growth. A highly preferred embodiment of the invention includes a method |
| | | proliferation, activation, and apoptosis. Exemplary assays for JNK and p38 kinase activity | for stimulating endothelial cell proliferation. An alternative highly preferred |
| | | that may be used or routinely modified to test JNK and p38 kinase-induced activity of | embodiment of the invention includes a method for inhibiting endothelial cell |
| | | polypeptides of the invention (including antibodies and agonists or antagonists of the | proliferation. A highly preferred embodiment of the invention includes a |
| | | invention) include the assays disclosed in Forrer et al., Biol Chem 379(8-9): 1101-1110 | method for stimulating apoptosis of endothelial cells. An alternative highly |
| | | (1998); Gupta et al., Exp Cell Res 247(2): 495-504 (1999); Kyriakis JM, Biochem Soc | preferred embodiment of the invention includes a method for inhibiting (e.g., |
| | | Symp 64: 29-48 (1999); Chang and Karin, Nature 410(6824): 37-40 (2001); and Cobb MH, | decreasing) apoptosis of endothelial cells. A highly preferred |
| | | Prog Biophys Mol Biol 71(3-4): 479-500 (1999); the contents of each of which are herein | embodiment of the invention includes a method for stimulating (e.g., |
| | | incorporated by reference in its entirety. Endothelial cells that may be used according to | increasing) endothelial cell activation. An alternative highly preferred |
| | | these assays are publicly available (e.g., through the ATCC ™). Exemplary endothelial | embodiment of the invention includes a method for inhibiting (e.g., |
| | | cells that may be used according to these assays include human umbilical vein endothelial | decreasing) the activation of and/or inactivating endothelial cells. A |
| | | cells (HUVEC), which are endothelial cells which line venous blood vessels, and are | highly preferred embodiment of the invention includes a method for |
| | | involved in functions that include, but are not limited to, angiogenesis, vascular | stimulating angiogenisis. An alternative highly preferred embodiment of the |
| | | permeability, vascular tone, and immune cell extravasation. | invention includes a method for inhibiting angiogenesis. A highly |
| | | | preferred embodiment of the invention includes a method for reducing cardiac |
| | | | hypertrophy. An alternative highly preferred embodiment of the invention |
| | | | includes a method for inducing cardiac hypertrophy. Highly preferred |
| | | | indications include neoplastic diseases (e.g., as described below under |
| | | | “Hyperproliferative Disorders”), and disorders of the cardiovascular system |
| | | | (e.g., heart disease, congestive heart failure, hypertension, aortic stenosis, |
| | | | cardiomyopathy, valvular regurgitation, left ventricular dysfunction, |
| | | | atherosclerosis and atherosclerotic vascular disease, diabetic nephropathy, |
| | | | intracardiac shunt, cardiac hypertrophy, myocardial infarction, chronic |
| | | | hemodynamic overload, and/or as described below under “Cardiovascular |
| | | | Disorders”). Highly preferred indications include cardiovascular, endothelial |
| | | | and/or angiogenic disorders (e.g., systemic disorders that affect vessels such |
| | | | as diabetes mellitus, as well as diseases of the vessels themselves, such as of |
| | | | the arteries, capillaries, veins and/or lymphatics). Highly preferred are |
| | | | indications that stimulate angiogenesis and/or cardiovascularization. Highly |
| | | | preferred are indications that inhibit angiogenesis and/or |
| | | | cardiovascularization. Highly preferred indications include antiangiogenic |
| | | | activity to treat solid tumors, leukemias, and Kaposi''s sarcoma, and retinal |
| | | | disorders. Highly preferred indications include neoplasms and cancer, such as, |
| | | | Kaposi''s sarcoma, hemangioma (capillary and cavernous), glomus tumors, |
| | | | telangiectasia, bacillary angiomatosis, hemangioendothelioma, angiosarcoma, |
| | | | haemangiopericytoma, lymphangioma, lymphangiosarcoma. Highly |
| | | | preferred indications also include cancers such as, prostate, breast, lung, |
| | | | colon, pancreatic, esophageal, stomach, brain, liver, and urinary cancer. |
| | | | Preferred indications include benign dysproliferative disorders and pre- |
| | | | neoplastic conditions, such as, for example, hyperplasia, metaplasia, and/or |
| | | | dysplasia. Highly preferred indications also include arterial disease, such |
| | | | as, atherosclerosis, hypertension, coronary artery disease, inflammatory |
| | | | vasculitides, Reynaud''s disease and Reynaud''s phenomenom, aneurysms, |
| | | | restenosis; venous and lymphatic disorders such as thrombophlebitis, |
| | | | lymphangitis, and lymphedema; and other vascular disorders such as |
| | | | peripheral vascular disease, and cancer. Highly preferred indications also |
| | | | include trauma such as wounds, burns, and injured tissue (e.g., vascular injury |
| | | | such as, injury resulting from balloon angioplasty, and atheroschlerotic |
| | | | lesions), implant fixation, scarring, ischemia reperfusion injury, rheumatoid |
| | | | arthritis, cerebrovascular disease, renal diseases such as acute renal failure, |
| | | | and osteoporosis. Additional highly preferred indications include stroke, |
| | | | graft rejection, diabetic or other retinopathies, thrombotic and coagulative |
| | | | disorders, vascularitis, lymph angiogenesis, sexual disorders, age-related |
| | | | macular degeneration, and treatment/prevention of endometriosis and related |
| | | | conditions. Additional highly preferred indications include fibromas, heart |
| | | | disease, cardiac arrest, heart valve disease, and vascular disease. |
| | | | Preferred indications include blood disorders (e.g., as described below under |
| | | | “Immune Activity”, “Blood-Related Disorders”, and/or “Cardiovascular |
| | | | Disorders”). Preferred indications include autoimmune diseases (e.g., |
| | | | rheumatoid arthritis, systemic lupus erythematosis, multiple sclerosis and/or |
| | | | as described below) and immunodeficiencies (e.g., as described below). |
| | | | Additional preferred indications include inflammation and inflammatory |
| | | | disorders (such as acute and chronic inflammatory diseases, e.g., |
| | | | inflammatory bowel disease and Crohn's disease), and pain management. |
| 7 | Activation of Hepatocyte | Kinase assay. Kinase assays, for example an Elk-1 kinase assay, for ERK signal | A highly preferred embodiment of the invention includes a method for |
| | ERK Signaling Pathway | transduction that regulate cell proliferation or differentiation are well known in the art and | stimulating hepatocyte cell proliferation. An altenative highly preferred |
| | | may be used or routinely modified to assess the ability of polypeptides of the invention | embodiment of the invention includes a method for inhibiting hepatocyte cell |
| | | (including antibodies and agonists or antagonists of the invention) to promote or inhibit | proliferation. A highly preferred embodiment of the invention includes a |
| | | cell proliferation, activation, and differentiation. Exemplary assays for ERK kinase | method for stimulating hepatocyte cell differentiation. An alternative highly |
| | | activity that may be used or routinely modified to test ERK kinase-induced activity of | preferred embodiment of the invention includes a method for inhibiting |
| | | polypeptides of the invention (including antibodies and agonists or antagonists of the | hepatocyte cell differentiation. A highly preferred embodiment of the |
| | | invention) include the assays disclosed in Forrer et al., Biol Chem 379(8-9): 1101-1110 | invention includes a method for activating hepatocyte cells. An alternative |
| | | (1998); Kyriakis JM, Biochem Soc Symp 64: 29-48 (1999); Chang and Karin, Nature | highly preferred embodiment of the invention includes a method for inhibiting |
| | | 410(6824): 37-40 (2001); and Cobb MH, Prog Biophys Mol Biol 71(3-4): 479-500 (1999); | the activation of and/or inactivating hepatocyte cells. Highly preferred |
| | | the contents of each of which are herein incorporated by reference in its entirety. Rat liver | indications include disorders of the liver and/or endocrine disorders (e.g., as |
| | | hepatoma cells that may be used according to these assays are publicly available (e.g., | described below under “Endocrine Disorders”). Preferred indications |
| | | through the ATCC ™). Exemplary rat liver hepatoma cells that may be used according to | include neoplastic diseases (e.g., as described below under |
| | | these assays include H4lle cells, which are known to respond to glucocorticoids, insulin, or | “Hyperproliferative Disorders”), blood disorders (e.g., as described below |
| | | cAMP derivatives. | under “Immune Activity”, “Cardiovascular Disorders”, and/or “Blood-Related |
| | | | Disorders”), immune disorders (e.g., as described below under “Immune |
| | | | Activity”), neural disorders (e.g., as described below under “Neural Activity |
| | | | and Neurological Diseases”), and infection (e.g., as described below under |
| | | | “Infectious Disease”). A highly preferred indication is diabetes |
| | | | mellitus. An additional highly preferred indication is a complication |
| | | | associated with diabetes (e.g., diabetic retinopathy, diabetic nephropathy, |
| | | | kidney disease (e.g., renal failure, nephropathy and/or other diseases and |
| | | | disorders as described in the “Renal Disorders” section below), diabetic |
| | | | neuropathy, nerve disease and nerve damage (e.g., due to diabetic |
| | | | neuropathy), blood vessel blockage, heart disease, stroke, impotence (e.g., due |
| | | | to diabetic neuropathy or blood vessel blockage), seizures, mental confusion, |
| | | | drowsiness, nonketotic hyperglycemic-hyperosmolar coma, cardiovascular |
| | | | disease (e.g., heart disease, atherosclerosis, microvascular disease, |
| | | | hypertension, stroke, and other diseases and disorders as described in the |
| | | | “Cardiovascular Disorders” section below), dyslipidemia, endocrine disorders |
| | | | (as described in the “Endocrine Disorders” section below), neuropathy, vision |
| | | | impairment (e.g., diabetic retinopathy and blindness), ulcers and impaired |
| | | | wound healing, infection (e.g., infectious diseases and disorders as described |
| | | | in the “Infectious Diseases” section below, especially of the urinary tract and |
| | | | skin), carpal tunnel syndrome and Dupuytren's contracture). An additional |
| | | | highly preferred indication is obesity and/or complications associated with |
| | | | obesity. Additional highly preferred indications include weight loss or |
| | | | alternatively, weight gain. Additional highly preferred indications are |
| | | | complications associated with insulin resistance. Additional highly |
| | | | preferred indications are disorders of the musculoskeletal systems including |
| | | | myopathies, muscular dystrophy, and/or as described herein. |
| | | | Additional highly preferred indications include, hepatitis, jaundice, gallstones, |
| | | | cirrhosis of the liver, degenerative or necrotic liver disease, alcoholic liver |
| | | | diseases, fibrosis, liver regeneration, metabolic disease, dyslipidemia and |
| | | | chlolesterol metabolism. Additional highly preferred |
| | | | indications include neoplasms and cancers, such as, hepatocarcinomas, other |
| | | | liver cancers, and colon and pancreatic cancer. Preferred indications also |
| | | | include prostate, breast, lung, esophageal, stomach, brain, and urinary |
| | | | cancer. Other preferred indications include benign dysproliferative disorders |
| | | | and pre-neoplastic conditions, such as, for example, hyperplasia, metaplasia, |
| | | | and/or dysplasia. |
| 8 | Activation of JNK Signaling | Kinase assay. JNK kinase assays for signal transduction that regulate cell proliferation, | Highly preferred indications include asthma, allergy, hypersensitivity |
| | Pathway in immune cells | activation, or apoptosis are well known in the art and may be used or routinely modified to | reactions, inflammation, and inflammatory disorders. Additional highly |
| | (such as eosinophils). | assess the ability of polypeptides of the invention (including antibodies and agonists or | preferred indications include immune and hematopoietic disorders (e.g., as |
| | | antagonists of the invention) to promote or inhibit cell proliferation, activation, and | described below under “Immune Activity”, and “Blood-Related Disorders”), |
| | | apoptosis. Exemplary assays for JNK kinase activity that may be used or routinely | autoimmune diseases (e.g., rheumatoid arthritis, systemic lupus erythematosis, |
| | | modified to test JNK kinase-induced activity of polypeptides of the invention (including | Crohn''s disease, multiple sclerosis and/or as described below), |
| | | antibodies and agonists or antagonists of the invention) include the assays disclosed in | immunodeficiencies (e.g., as described below). Highly preferred indications |
| | | Forrer et al., Biol Chem 379(8-9): 1101-1110 (1998); Gupta et al., Exp Cell Res 247(2): | also include boosting or inhibiting immune cell proliferation. Preferred |
| | | 495-504 (1999); Kyriakis JM, Biochem Soc Symp 64: 29-48 (1999); Chang and Karin, | indications include neoplastic diseases (e.g., leukemia, lymphoma, and/or as |
| | | Nature 410(6824): 37-40 (2001); and Cobb MH, Prog Biophys Mol Biol 71(3-4): 479-500 | described below under “Hyperproliferative Disorders”). Highly preferred |
| | | (1999); the contents of each of which are herein incorporated by reference in its entirety. | indications include boosting an eosinophil-mediated immune response, and |
| | | Exemplary cells that may be used according to these assays include eosinophils. | suppressing an eosinophil-mediated immune response. |
| | | Eosinophils are important in the late stage of allergic reactions; they are recruited to tissues | |
| | | and mediate the inflammatory response of late stage allergic reaction. Moreover, | |
| | | exemplary assays that may be used or routinely modified to assess the ability of | |
| | | polypeptides of the invention (including antibodies and agonists or antagonists of the | |
| | | invention) to modulate signal transduction, cell proliferation, activation, or apoptosis in | |
| | | eosinophils include assays disclosed and/or cited in: Zhang JP, et al., “Role of caspases in | |
| | | dexamethasone-induced apoptosis and activation of c-Jun NH2-terminal kinase and p38 | |
| | | mitogen-activated protein kinase in human eosinophils” Clin Exp Immunol; | |
| | | Oct; 122(1): 20-7 (2000); Hebestreit H, et al., “Disruption of fas receptor signaling by nitricoxide | |
| | | in eosinophils” J Exp Med; Feb 2; 187(3): 415-25 (1998); J Allergy Clin Immunol | |
| | | 1999 Sep; 104(3 Pt 1): 565-74; and, Sousa AR, et al., “In vivo resistance to corticosteroids | |
| | | in bronchial asthma is associated with enhanced phosyphorylation of JUN N-terminal | |
| | | kinase and failure of prednisolone to inhibit JUN N-terminal kinase phosphorylation” J | |
| | | Allergy Clin Immunol; Sep; 104(3 Pt 1): 565-74 (1999); the contents of each of which are | |
| | | herein incorporated by reference in its entirety. | |
| 9 | Activation of Natural Killer | Kinase assay. Kinase assays, for example an ElK-1 kinase assay, for ERK signal | A highly preferred embodiment of the invention includes a method for |
| | Cell ERK Signaling Pathway. | transduction that regulate cell proliferation or differentiation are well known in the art and | stimulating natural killer cell proliferation. An alternative highly preferred |
| | | may be used or routinely modified to assess the ability of polypeptides of the invention | embodiment of the invention includes a method for inhibiting natural killer |
| | | (including antibodies and agonists or antagonists of the invention) to promote or inhibit | cell proliferation. A highly preferred embodiment of the invention |
| | | cell proliferation, activation, and differentiation. Exemplary assays for ERK kinase | includes a method for stimulating natural killer cell differentiation. An |
| | | activity that may be used or routinely modified to test ERK kinase-induced activity of | alternative highly preferred embodiment of the invention includes a method |
| | | polypeptides of the invention (including antibodies and agonists or antagonists of the | for inhibiting natural killer cell differentiation. Highly preferred |
| | | invention) include the assays disclosed in Forrer et al., Biol Chem 379(8-9): 1101-1110 | indications include neoplastic diseases (e.g., as described below under |
| | | (1998); Kyriakis JM, Biochem Soc Symp 64: 29-48 (1999); Chang and Karin, Nature | “Hyperproliferative Disorders”), blood disorders (e.g., as described below |
| | | 410(6824): 37-40 (2001); and Cobb MH, Prog Biophys Mol Biol 71(3-4): 479-500 (1999); | under “Immune Activity”, “Cardiovascular Disorders”, and/or “Blood-Related |
| | | the contents of each of which are herein incorporated by reference in its entirety. Natural | Disorders”), immune disorders (e.g., as described below under “Immune |
| | | killer cells that may be used according to these assays are publicly available (e.g., through | Activity”) and infections (e.g., as described below under “Infectious |
| | | the ATCC ™). Exemplary natural killer cells that may be used according to these assays | Disease”). Preferred indications include blood disorders (e.g., as described |
| | | include the human natural killer cell lines (for example, NK-YT cells which have cytolytic | below under “Immune Activity”, “Blood-Related Disorders”, and/or |
| | | and cytotoxic activity) or primary NK cells. | “Cardiovascular Disorders”). Highly preferred indications include |
| | | | autoimmune diseases (e.g., rheumatoid arthritis, systemic lupus erythematosis, |
| | | | multiple sclerosis and/or as described below) and immunodeficiencies (e.g., as |
| | | | described below). Additional highly preferred indications include |
| | | | inflammation and inflammatory disorders. Highly preferred indications |
| | | | also include cancers such as, kidney, melanoma, prostate, breast, lung, colon, |
| | | | pancreatic, esophageal, stomach, brain, liver, urinary cancer, lymphoma and |
| | | | leukemias. Other preferred indications include benign dysproliferative |
| | | | disorders and pre-neoplastic conditions, such as, for example, hyperplasia, |
| | | | metaplasia, and/or dysplasia. Other highly preferred indications include, |
| | | | pancytopenia, leukopenia, leukemias, Hodgkin's disease, acute lymphocytic |
| | | | anemia (ALL), arthritis, asthma, AIDS, granulomatous disease, inflammatory |
| | | | bowel disease, sepsis, psoriasis, immune reactions to transplanted organs and |
| | | | tissues, endocarditis, meningitis, Lyme Disease, and allergies. |
| 10 | Activation of Skeletal Mucle | Kinase assay. Kinase assays, for example an GSK-3 kinase assay, for PI3 kinase signal | A highly preferred embodiment of the invention includes a method for |
| | Cell PI3 Kinase Signalling | transduction that regulate glucose metabolism and cell survivial are well-known in the art | increasing muscle cell survival An alternative highly preferred embodiment of |
| | Pathway | and may be used or routinely modified to assess the ability of polypeptides of the invention | the invention includes a method for decreasing muscle cell survival. A |
| | | (including antibodies and agonists or antagonists of the invention) to promote or inhibit | preferred embodiment of the invention includes a method for stimulating |
| | | glucose metabolism and cell survival. Exemplary assays for PI3 kinase activity that may | muscle cell proliferation. In a specific embodiment, skeletal muscle cell |
| | | be used or routinely modified to test PI3 kinase-induced activity of polypeptides of the | proliferation is stimulated. An alternative highly preferred embodiment of the |
| | | invention (including antibodies and agonists or antagonists of the invention) include assays | invention includes a method for inhibiting muscle cell proliferation. In a |
| | | disclosed in Forrer et al., Biol Chem 379(8-9): 1101-1110 (1998); Nikoulina et al., | specific embodiment, skeletal muscle cell proliferation is inhibited. A |
| | | Diabetes 49(2): 263-271 (2000); and Schreyer et al., Diabetes 48(8): 1662-1666 (1999), the | preferred embodiment of the invention includes a method for stimulating |
| | | contents of each of which are herein incorporated by reference in its entirety. Rat | muscle cell differentiation. In a specific embodiment, skeletal muscle cell |
| | | myoblast cells that may be used according to these assays are publicly available (e.g., | differentiation is stimulated. An alternative highly preferred embodiment of |
| | | through the ATCC ™). Exemplary rat myoblast cells that may be used according to these | the invention includes a method for inhibiting muscle cell differentiation. In a |
| | | assays include L6 cells. L6 is an adherent rat myoblast cell line, isolated from primary | specific embodiment, skeletal muscle cell differentiation is inhibited. |
| | | cultures of rat thigh muscle, that fuses to form multinucleated myotubes and striated fibers | Highly preferred indications include disorders of the musculoskeletal system. |
| | | after culture in differentiation media. | Preferred indications include neoplastic diseases (e.g., as described below |
| | | | under “Hyperproliferative Disorders”), endocrine disorders (e.g., as described |
| | | | below under “Endocrine Disorders”), neural disorders (e.g., as described |
| | | | below under “Neural Activity and Neurological Diseases”), blood disorders |
| | | | (e.g., as described below under “Immune Activity”, “Cardiovascular |
| | | | Disorders”, and/or “Blood-Related Disorders”), immune disorders (e.g., as |
| | | | described below under “Immune Activity”), and infection (e.g., as described |
| | | | below under “Infectious Disease”). A highly preferred indication is |
| | | | diabetes mellitus. An additional highly preferred indication is a |
| | | | complication associated with diabetes (e.g., diabetic retinopathy, diabetic |
| | | | nephropathy, kidney disease (e.g., renal failure, nephropathy and/or other |
| | | | diseases and disorders as described in the “Renal Disorders” section below), |
| | | | diabetic neuropathy, nerve disease and nerve damage (e.g, due to diabetic |
| | | | neuropathy), blood vessel blockage, heart disease, stroke, impotence (e.g., due |
| | | | to diabetic neuropathy or blood vessel blockage), seizures, mental confusion, |
| | | | drowsiness, nonketotic hyperglycemic-hyperosmolar coma, cardiovascular |
| | | | disease (e.g., heart disease, atherosclerosis, microvascular disease, |
| | | | hypertension, stroke, and other diseases and disorders as described in the |
| | | | “Cardiovascular Disorders” section below), dyslipidemia, endocrine disorders |
| | | | (as described in the “Endocrine Disorders” section below), neuropathy, vision |
| | | | impairment (e.g., diabetic retinopathy and blindness), ulcers and impaired |
| | | | wound healing, infections (e.g., infectious diseases and disorders as described |
| | | | in the “Infectious Diseases” section below, especially of the urinary tract and |
| | | | skin), carpal tunnel syndrome and Dupuytren's contracture). An |
| | | | additional highly preferred indication is obesity and/or complications |
| | | | associated with obesity. Additional highly preferred indications include |
| | | | weight loss or alternatively, weight gain. Additional highly preferred |
| | | | indications are complications associated with insulin resistance. |
| | | | Additonal highly preferred indications are disorders of the musculoskeletal |
| | | | system including myopathies, muscular dystrophy, and/or as described herein. |
| | | | Additional highly preferred indications include: myopathy, atrophy, |
| | | | congestive heart failure, cachexia, myxomas, fibromas, congenital |
| | | | cardiovascular abnormalities, heart disease, cardiac arrest, heart valve disease, |
| | | | and vascular disease. Highly preferred indications include neoplasms and |
| | | | cancer, such as, rhabdomyoma, rhabdosarcoma, stomach, esophageal, |
| | | | prostate, and urinary cancer. Preferred indications also include breast, lung, |
| | | | colon, pancreatic, brain, and liver cancer. Other preferred indications include |
| | | | benign dysproliferative disorders and pre-neoplastic conditions, such as, |
| | | | hyperplasia, metaplasia, and/or dysplasia. |
| 11 | Activation of T-Cell p38 or | Kinase assay. JNK and p38 kinase assays for signal transduction that regulate cell | Preferred indications include neoplastic diseases (e.g., as described below |
| | JNK Signaling Pathway. | proliferation, activation, or apoptosis are well known in the art and may be used or | under “Hyperproliferative Disorders”), blood disorders (e.g., as described |
| | | routinely modified to assess the ability of polypeptides of the invention (including | below under “Immune Activity”, “Cardiovascular Disorders”, and/or “Blood- |
| | | antibodies and agonists or antagonists of the invention) to promote or inhibit immune cell | Related Disorders”), and infection (e.g., an infectious disease as described |
| | | (e.g. T-cell) proliferation, activation, and apoptosis. Exemplary assays for JNK and p38 | below under “Infectious Disease”). Highly preferred indications include |
| | | kinase activity that may be used or routinely modified to test JNK and p38 kinase-induced | autoimmune diseases (e.g., rheumatoid arthritis, systemic lupus erythematosis, |
| | | activity of polypeptides of the invention (including antibodies and agonists or antagonists | multiple sclerosis and/or as described below) and immunodeficiencies (e.g., as |
| | | of the invention) include the assays disclosed in Forrer et al., Biol Chem 379(8-9): 1101-1110 | described below). Additional highly preferred indications include |
| | | (1998); Gupta et al., Exp Cell Res 247(2): 495-504 (1999); Kyriakis JM, Biochem | inflammation and inflammatory disorders. Highly preferred indications also |
| | | Soc Symp 64: 29-48 (1999); Chang and Karin, Nature 410(6824): 37-40 (2001); and Cobb MH, | include neoplastic diseases (e.g., leukemia, lymphoma, and/or as described |
| | | Prog Biophys Mol Biol 71(3-4): 479-500 (1999); the contents of each of which are | below under “Hyperproliferative Disorders”). Highly preferred indications |
| | | herein incorporated by reference in its entirety. T cells that may be used according to these | include neoplasms and cancers, such as, leukemia, lymphoma, prostate, breast, |
| | | assays are publicly available (e.g., through the ATCC ™). Exemplary mouse T cells that | lung, colon, pancreatic, esophageal, stomach, brain, liver, and urinary cancer. |
| | | may be used according to these assays include the CTLL cell line, which is an IL-2 | Other preferred indications include benign dysproliferative disorders and pre- |
| | | dependent suspension-culture cell line with cytotoxic activity. | neoplastic conditions, such as, for example, hyperplasia, metaplasia, and/or |
| | | | dysplasia. Preferred indications include arthritis, asthma, AIDS, allergy, |
| | | | anemia, pancytopenia, leukopenia, thrombocytopenia, Hodgkin''s disease, |
| | | | acute lymphocytic anemia (ALL), plasmacytomas, multiple myeloma, |
| | | | Burkitt''s lymphoma, granulomatous disease, inflammatory bowel disease, |
| | | | sepsis, psoriasis, suppression of immune reactions to transplanted organs and |
| | | | tissues, endocarditis, meningitis, and Lyme Disease. |
| 12 | Activation of Transcription | Assays for activation of transcription are well-known in the art and may be used and | |
| | | routinely modified to assess ability of polypeptides of the invention to inhibit or activate | |
| | | transcription. An example of such an assay follows: Cells were pretreated with SID | |
| | | supernatants or controls for 15-18 hours. SEAP activity was measured after 48 hours. | |
| | | LS174T is an epithelial colon adenocarcinoma cell line. Its tumourigenicity in nude mice | |
| | | make cell line LS174T a model for studies on the mechanism of synthesis and secretion of | |
| | | specific tumoral markers in colon cancer. See, Patan et al., Circ Res, 89(8): 732-39 (2001), | |
| | | the contents of which are herein incorporated by reference in its entirety. | |
| 13 | Activation of transcription | Assays for the activation of transcription through the AP1 response element are known in | Preferred indications include neoplastic diseases (e.g., as described below |
| | through AP1 response | the art and may be used or routinely modified to assess the ability of polypeptides of the | under “Hyperproliferative Disorders”), blood disorders (e.g., as described |
| | element in immune cells | invention (including antibodies and agonists or antagonists of the invention) to modulate | below under “Immune Activity”, “Cardiovascular Disorders”, and/or “Blood- |
| | (such as T-cells). | growth and other cell functions. Exemplary assays for transcription through the AP1 | Related Disorders”), and infection (e.g., an infectious disease as described |
| | | response element that may be used or routinely modified to test AP1-response element | below under “Infectious Disease”). Highly preferred indications include |
| | | activity of polypeptides of the invention (including antibodies and agonists or antagonists | autoimmune diseases (e.g., rheumatoid arthritis, systemic lupus erythematosis, |
| | | of the invention) include assays disclosed in Berger et al., Gene 66: 1-10 (1988); Cullen | multiple sclerosis and/or as described below) and immunodeficiencies (e.g., as |
| | | and Malm, Methods in Enzymol 216: 362-368 (1992); Henthorn et al., Proc Natl Acad Sci | described below). Additional highly preferred indications include |
| | | USA 85: 6342-6346 (1988); Rellahan et al., J Biol Chem 272(49): 30806-30811 (1997); | inflammation and inflammatory disorders. Highly preferred indications also |
| | | Chang et al., Mol Cell Biol 18(9): 4986-4993 (1998); and Fraser et al., Eur J Immunol | include neoplastic diseases (e.g., leukemia, lymphoma, and/or as described |
| | | 29(3): 838-844 (1999), the contents of each of which are herein incorporated by reference | below under “Hyperproliferative Disorders”). Highly preferred indications |
| | | in its entirety. Mouse T cells that may be used according to these assays are publicly | include neoplasms and cancers, such as, leukemia, lymphoma, prostate, breast, |
| | | available (e.g., through the ATCC ™). Exemplary mouse T cells that may be used | lung, colon, pancreatic, esophageal, stomach, brain, liver, and urinary cancer. |
| | | according to these assays include the HT2 cell line, which is an IL-2 dependent suspension | Other preferred indications include benign dysproliferative disorders and pre- |
| | | culture cell line that also responds to IL-4. | neoplastic conditions, such as, for example, hyperplasia, metaplasia, and/or |
| | | | dysplasia. Preferred indications include arthritis, asthma, AIDS, allergy, |
| | | | anemia, pancytopenia, leukopenia, thrombocytopenia, Hodgkin's disease, |
| | | | acute lymphocytic anemia (ALL), plasmacytomas, multiple myeloma, |
| | | | Burkitt's lymphoma, granulomatous disease, inflammatory bowel disease, |
| | | | sepsis, psoriasis, suppression of immune reactions to transplanted organs and |
| | | | tissues, endocarditis, meningitis, and Lyme Disease. |
| 14 | Activation of transcription | Assays for the activation of transcription through the AP1 response element are known in | Preferred indications include neoplastic diseases (e.g., as described below |
| | through AP1 response | the art and may be used or routinely modified to assess the ability of polypeptides of the | under “Hyperproliferative Disorders”), blood disorders (e.g., as described |
| | element in immune cells | invention (including antibodies and agonists or antagonists of the invention) to modulate | below under “Immune Activity”, “Cardiovascular Disorders”, and/or “Blood- |
| | (such as T-cells). | growth and other cell functions. Exemplary assays for transcription through the AP1 | Related Disorders”), and infection (e.g., an infectious disease as described |
| | | response element that may be used or routinely modified to test AP1-response element | below under “Infectious Disease”). Highly preferred indications include |
| | | activity of polypeptides of the invention (including antibodies and agonists or antagonists | autoimmune diseases (e.g., rheumatoid arthritis, systemic lupus erythematosis, |
| | | of the invention) include assays disclosed in Berger et al., Gene 66: 1-10 (1988); Cullen | multiple sclerosis and/or as described below) and immunodeficiencies (e.g., as |
| | | and Malm, Methods in Enzymol 216: 362-368 (1992); Henthorn et al., Proc Natl Acad Sci | described below). Additional highly preferred indications include |
| | | USA 85: 6342-6346 (1988); Rellahan et al., J Biol Chem 272(49): 30806-30811 (1997); | inflammation and inflammatory disorders. Highly preferred indications also |
| | | Chang et al., Mol Cell Biol 18(9): 4986-4993 (1998); and Fraser et al., Eur J Immunol | include neoplastic diseases (e.g., leukemia, lymphoma, and/or as described |
| | | 29(3): 838-844 (1999), the contents of each of which are herein incorporated by reference | below under “Hyperproliferative Disorders”). Highly preferred indications |
| | | in its entirety. T cells that may be used according to these assays are publicly available | include neoplasms and cancers, such as, leukemia, lymphoma, prostate, breast, |
| | | (e.g., through the ATCC ™). Exemplary mouse T cells that may be used according to | lung, colon, pancreatic, esophageal, stomach, brain, liver, and urinary cancer. |
| | | these assays include the CTLL cell line, which is an IL-2 dependent suspension-culture | Other preferred indications include benign dysproliferative disorders and pre- |
| | | cell line with cytotoxic activity. | neoplastic conditions, such as, for example, hyperplasia, metaplasia, and/or |
| | | | dysplasia. Preferred indications include arthritis, asthma, AIDS, allergy, |
| | | | anemia, pancytopenia, leukopenia, thrombocytopenia, Hodgkin's disease, |
| | | | acute lymphocytic anemia (ALL), plasmacytomas, multiple myeloma, |
| | | | Burkitt's lymphoma, granulomatous disease, inflammatory bowel disease, |
| | | | sepsis, psoriasis, suppression of immune reactions to transplanted organs and |
| | | | tissues, endocarditis, meningitis, and Lyme Disease. |
| 15 | Activation of transcription | Assays for the activation of transcription through the AP1 response element are well- | Preferred indications include neoplastic diseases (e.g., as described below |
| | through AP1 response | known in the art and may be used or routinely modified to assess the ability of | under “Hyperproliferative Disorders”), blood disorders (e.g., as described |
| | element in immune cells | polypeptides of the invention (including antibodies and agonists or antagonists of the | below under “Immune Activity”, “Cardiovascular Disorders”, and/or “Blood- |
| | (such as T-cells). | invention) to modulate growth and other cell functions. Exemplary assays for transcription | Related Disorders”), and infection (e.g., an infectious disease as described |
| | | through the AP1 response element that may be used or routinely modified to test AP1- | below under “Infectious Disease”). Highly preferred indications include |
| | | response element activity of polypeptides of the invention (including antibodies and | autoimmune diseases (e.g., rheumatoid arthritis, systemic lupus erythematosis, |
| | | agonists or antagonists of the invention) include assays disclosed in Berger et al., Gene | multiple sclerosis and/or as described below) and immunodeficiencies (e.g., as |
| | | 66: 1-10 (1988); Cullen and Malm, Methods in Enzymol 216: 362-368 (1992); Henthorn et | described below). Additional highly preferred indications include |
| | | al., Proc Natl Acad Sci USA 85: 6342-6346 (1988); Rellahan et al., J Biol Chem | inflammation and inflammatory disorders. Highly preferred indications also |
| | | 272(49): 30806-30811 (1997); Chang et al., Mol Cell Biol 18(9): 4986-4993 (1998); and | include neoplastic diseases (e.g., leukemia, lymphoma, and/or as described |
| | | Fraser et al., Eur J Immunol 29(3): 838-844 (1999), the contents of each of which are | below under “Hyperproliferative Disorders”). Highly preferred indications |
| | | herein incorporated by reference in its entirety. Human T cells that may be used according | include neoplasms and cancers, such as, leukemia, lymphoma, prostate, breast, |
| | | to these assays are publicly available (e.g., through the ATCC ™). Exemplary human T | lung, colon, pancreatic, esophageal, stomach, brain, liver, and urinary cancer. |
| | | cells that may be used according to these assays include the SUPT cell line, which is an | Other preferred indications include benign dysproliferative disorders and pre- |
| | | IL-2 and IL-4 responsive suspension-culture cell line. | neoplastic conditions, such as, for example, hyperplasia, metaplasia, and/or |
| | | | dysplasia. Preferred indications include arthritis, asthma, AIDS, allergy, |
| | | | anemia, pancytopenia, leukopenia, thrombocytopenia, Hodgkin's disease, |
| | | | acute lymphocytic anemia (ALL), plasmacytomas, multiple myeloma, |
| | | | Burkitt's lymphoma, granulomatous disease, inflammatory bowel disease, |
| | | | sepsis, psoriasis, suppression of immune reactions to transplanted organs and |
| | | | tissues, endocarditis, meningitis, and Lyme Disease. |
| 16 | Activation of transcription | Assays for the activation of transcription through the cAMP response element are well- | A highly preferred indication is obesity and/or complications associated with |
| | through cAMP response | known in the art and may be used or routinely modified to assess the ability of | obesity. Additional highly preferred indications include weight loss or |
| | element (CRE) in pre- | polypeptides of the invention (including antibodies and agonists or antagonists of the | alternatively, weight gain. An additional highly preferred indication is |
| | adipocytes. | invention) to increase cAMP, regulate CREB transcription factors, and modulate | diabetes mellitus. An additional highly preferred indication is a complication |
| | | expression of genes involved in a wide variety of cell functions. For example, a 3T3- | associated with diabetes (e.g., diabetic retinopathy, diabetic nephropathy, |
| | | L1/CRE reporter assay may be used to identify factors that activate the cAMP signaling | kidney disease (e.g., renal failure, nephropathy and/or other diseases and |
| | | pathway. CREB plays a major role in adipogenesis, and is involved in differentiation into | disorders as described in the “Renal Disorders” section below), diabetic |
| | | adipocytes. CRE contains the binding sequence for the transcription factor CREB (CRE | neuropathy, nerve disease and nerve damage (e.g., due to diabetic |
| | | binding protein). Exemplary assays for transcription through the cAMP response element | neuropathy), blood vessel blockage, heart disease, stroke, impotence (e.g., due |
| | | that may be used or routinely modified to test cAMP-response element activity of | to diabetic neuropathy or blood vessel blockage), seizures, mental confusion, |
| | | polypeptides of the invention (including antibodies and agonists or antagonists of the | drowsiness, nonketotic hyperglycemic-hyperosmolar coma, cardiovascular |
| | | invention) include assays disclosed in Berger et al., Gene 66: 1-10 (1998); Cullen and | disease (e.g., heart disease, atherosclerosis, microvascular disease, |
| | | Malm, Methods in Enzymol 216: 362-368 (1992); Henthorn et al., Proc Natl Acad Sci USA | hypertension, stroke, and other diseases and disorders as described in the |
| | | 85: 6342-6346 (1988); Reusch et al., Mol Cell Biol 20(3): 1008-1020 (2000); and Klemm et | “Cardiovascular Disorders” section below), dyslipidemia, endocrine disorders |
| | | al., J Biol Chem 273: 917-923 (1998), the contents of each of which are herein incorporated | (as described in the “Endocrine Disorders” section below), neuropathy, vision |
| | | by reference in its entirety. Pre-adipocytes that may be used according to these assays are | impairment (e.g., diabetic retinopathy and blindness), ulcers and impaired |
| | | publicly available (e.g., through the ATCC ™) and/or may be routinely generated. | wound healing, and infection (e.g., infectious diseases and disorders as |
| | | Exemplary mouse adipocyte cells that may be used according to these assays include 3T3- | described in the “Infectious Diseases” section below, especially of the urinary |
| | | L1 cells. 3T3-L1 is an adherent mouse preadipocyte cell line that is a continuous substrain | tract and skin), carpal tunnel syndrome and Dupuytren's contracture). |
| | | of 3T3 fibroblast cells developed through clonal isolation and undergo a pre-adipocyte to | Additional highly preferred indications are complications associated with |
| | | adipose-like conversion under appropriate differentiation conditions known in the art. | insulin resistance. |
| 17 | Activation of transcription | Assays for the activation of transcription through the cAMP response element are well- | Preferred indications include blood disorders (e.g., as described below |
| | through cAMP response | known in the art and may be used or routinely modified to assess the ability of | under “Immune Activity”, “Blood-Related Disorders”, and/or “Cardiovascular |
| | element in immune cells | polypeptides of the invention (including antibodies and agonists or antagonists of the | Disorders”), and infection (e.g., an infectious disease as described below |
| | (such as T-cells). | invention) to increase cAMP and regulate CREB transcription factors, and modulate | under “Infectious Disease”). Preferred indications include autoimmune |
| | | expression of genes involved in a wide variety of cell functions. Exemplary assays for | diseases (e.g., rheumatoid arthritis, systemic lupus erythematosis, multiple |
| | | transcription through the cAMP response element that may be used or routinely modified | sclerosis and/or as described below), immunodeficiencies (e.g., as described |
| | | to test cAMP-response element activity of polypeptides of the invention (including | below), boosting a T cell-mediated immune response, and suppressing a T |
| | | antibodies and agonists or antagonists of the invention) include assays disclosed in Berger | cell-mediated immune response. Additional preferred indications include |
| | | et al., Gene 66: 1-10 (1998); Cullen and Malm, Methods in Enzymol 216: 362-368 (1992); | inflammation and inflammatory disorders. Highly preferred indications |
| | | Henthorn et al., Proc Natl Acad Sci USA 85: 6342-6346 (1988); Black et al., Virus Genes | include neoplastic diseases (e.g., leukemia, lymphoma, and/or as described |
| | | 15(2): 105-117 (1997); and Belkowski et al., J Immunol 161(2): 659-665 (1998), the | below under “Hyperproliferative Disorders”). Highly preferred indications |
| | | contents of each of which are herein incorporated by reference in its entirety. T cells that | include neoplasms and cancers, such as, for example, leukemia, lymphoma |
| | | may be used according to these assays are publicly available (e.g., through the ATCC ™). | (e.g., T cell lymphoma, Burkitt's lymphoma, non-Hodgkins lymphoma, |
| | | Exemplary mouse T cells that may be used according to these assays include the CTLL | Hodgkin''s disease), melanoma, and prostate, breast, lung, colon, pancreatic, |
| | | cell line, which is a suspension culture of IL-2 dependent cytotoxic T cells. | esophageal, stomach, brain, liver and urinary cancer. Other preferred |
| | | | indications include benign dysproliferative disorders and pre-neoplastic |
| | | | conditions, such as, for example, hyperplasia, metaplasia, and/or dysplasia. |
| | | | Preferred indications include anemia, pancytopenia, leukopenia, |
| | | | thrombocytopenia, acute lymphocytic anemia (ALL), plasmacytomas, |
| | | | multiple myeloma, arthritis, AIDS, granulomatous disease, inflammatory |
| | | | bowel disease, sepsis, neutropenia, neutrophilia, psoriasis, suppression of |
| | | | immune reactions to transplanted organs and tissues, hemophilia, |
| | | | hypercoagulation, diabetes mellitus, endocarditis, meningitis, Lyme Disease, |
| | | | and asthma and allergy. |
| 18 | Activation of transcription | Assays for the activation of transcription through the cAMP response element are well- | Preferred indications include blood disorders (e.g., as described below |
| | through cAMP response | known in the art and may be used or routinely modified to assess the ability of | under “Immune Activity”, “Blood-Related Disorders”, and/or “Cardiovascular |
| | element in immune cells | polypeptides of the invention (including antibodies and agonists or antagonists of the | Disorders”), and infection (e.g., an infectious disease as described below |
| | (such as T-cells). | invention) to increase cAMP, bind to CREB transcription factor, and modulate expression | under “Infectious Disease”). Preferred indications include autoimmune |
| | | of genes involved in a wide variety of cell functions. Exemplary assays for transcription | diseases (e.g., rheumatoid arthritis, systemic lupus erythematosis, multiple |
| | | through the cAMP response element that may be used or routinely modified to test cAMP- | sclerosis and/or as described below), immunodeficiencies (e.g., as described |
| | | response element activity of polypeptides of the invention (including antibodies and | below), boosting a T cell-mediated immune response, and suppressing a T |
| | | agonists or antagonists of the invention) include assays disclosed in Berger et al., Gene | cell-mediated immune response. Additional preferred indications include |
| | | 66: 1-10 (1998); Cullen and Malm, Methods in Enzymol 216: 362-368 (1992); Henthorn et | inflammation and inflammatory disorders. Highly preferred indications |
| | | al., Proc Natl Acad Sci USA 85: 6342-6346 (1988); Black et al., Virus Genes 15(2): 105-117 | include neoplastic diseases (e.g., leukemia, lymphoma, and/or as described |
| | | (1997); and Belkowski et al., J Immunol 161(2): 659-665 (1998), the contents of each | below under “Hyperproliferative Disorders”). Highly preferred indications |
| | | of which are herein incorporated by reference in its entirety. T cells that may be used | include neoplasms and cancers, such as, leukemia, lymphoma (e.g., T cell |
| | | according to these assays are publicly available (e.g., through the ATCC ™). Exemplary | lymphoma, Burkitt's lymphoma, non-Hodgkins lymphoma, Hodgkin''s |
| | | human T cells that may be used according to these assays include the JURKAT cell line, | disease), melanoma, and prostate, breast, lung, colon, pancreatic, esophageal, |
| | | which is a suspension culture of leukemia cells that produce IL-2 when stimulated. | stomach, brain, liver and urinary cancer. Other preferred indications include |
| | | | benign dysproliferative disorders and pre-neoplastic conditions, such as, for |
| | | | example, hyperplasia, metaplasia, and/or dysplasia. Preferred indications |
| | | | include anemia, pancytopenia, leukopenia, thrombocytopenia, acute |
| | | | lymphocytic anemia (ALL), plasmacytomas, multiple myeloma, arthritis, |
| | | | AIDS, granulomatous disease, inflammatory bowel disease, sepsis, |
| | | | neutropenia, neutrophilia, psoriasis, suppression of immune reactions to |
| | | | transplanted organs and tissues, hemophilia, hypercoagulation, diabetes |
| | | | mellitus, endocarditis, meningitis, Lyme Disease, and asthma and allergy. |
| 19 | Activation of transcription | Assays for the activation of transcription through the cAMP response element are well- | Preferred indications include blood disorders (e.g., as described below |
| | through cAMP response | known in the art and may be used or routinely modified to assess the ability of | under “Immune Activity”, “Blood-Related Disorders”, and/or “Cardiovascular |
| | element in immune cells | polypeptides of the invention (including antibodies and agonists or antagonists of the | Disorders”), and infection (e.g., an infectious disease as described below |
| | (such as T-cells). | invention) to increase cAMP, regulate CREB transcription factors, and modulate | under “Infectious Disease”). Preferred indications include autoimmune |
| | | expression of genes involved in a wide variety of cell functions. Exemplary assays for | diseases (e.g., rheumatoid arthritis, systemic lupus erythematosis, multiple |
| | | transcription through the cAMP response element that may be used or routinely modified | sclerosis and/or as described below), immunodeficiencies (e.g., as described |
| | | to test cAMP-response element activity of polypeptides of the invention (including | below), boosting a T cell-mediated immune response, and suppressing a T |
| | | antibodies and agonists or antagonists of the invention) include assays disclosed in Berger | cell-mediated immune response. Additional preferred indications include |
| | | et al., Gene 66: 1-10 (1998); Cullen and Malm, Methods in Enzymol 216: 362-368 (1992); | inflammation and inflammatory disorders. Highly preferred indications |
| | | Henthorn et al., Proc Natl Acad Sci USA 85: 6342-6346 (1988); Black et al., Virus Genes | include neoplastic diseases (e.g., leukemia, lymphoma, and/or as described |
| | | 15(2): 105-117 (1997); and Belkowski et al., J Immunol 161(2): 659-665 (1998), the | below under “Hyperproliferative Disorders”). Highly preferred indications |
| | | contents of each of which are herein incorporated by reference in its entirety. T cells that | include neoplasms and cancers, such as, for example, leukemia, lymphoma |
| | | may be used according to these assays are publicly available (e.g., through the ATCC ™). | (e.g., T cell lymphoma, Burkitt's lymphoma, non-Hodgkins lymphoma, |
| | | Exemplary mouse T cells that may be used according to these assays include the HT2 cell | Hodgkin''s disease), melanoma, and prostate, breast, lung, colon, pancreatic, |
| | | line, which is a suspension culture of IL-2 dependent T cells that also respond to IL-4. | esophageal, stomach, brain, liver and urinary cancer. Other preferred |
| | | | indications include benign dysproliferative disorders and pre-neoplastic |
| | | | conditions, such as, for example, hyperplasia, metaplasia, and/or dysplasia. |
| | | | Preferred indications include anemia, pancytopenia, leukopenia, |
| | | | thrombocytopenia, acute lymphocytic anemia (ALL), plasmacytomas, |
| | | | multiple myeloma, arthritis, AIDS, granulomatous disease, inflammatory |
| | | | bowel disease, sepsis, neutropenia, neutrophilia, psoriasis, suppression of |
| | | | immune reactions to transplanted organs and tissues, hemophilia, |
| | | | hypercoagulation, diabetes mellitus, endocarditis, meningitis, Lyme Disease, |
| | | | and asthma and allergy. |
| 20 | Activation of transcription | Assays for the activation of transcription through the CD28 response element are well- | A highly preferred embodiment of the invention includes a method for |
| | through CD28 response | known in the art and may be used or routinely modified to assess the ability of | stimulating T cell proliferation. An alternative highly preferred embodiment |
| | element in immune cells | polypeptides of the invention (including antibodies and agonists or antagonists of the | of the invention includes a method for inhibiting T cell proliferation. A |
| | (such as T-cells). | invention) to stimulate IL-2 expression in T cells. Exemplary assays for transcription | highly preferred embodiment of the invention includes a method for activating |
| | | through the CD28 response element that may be used or routinely modified to test CD28- | T cells. An alternative highly preferred embodiment of the invention includes |
| | | response element activity of polypeptides of the invention (including antibodies and | a method for inhibiting the activation of and/or inactivating T cells. A |
| | | agonists or antagonists of the invention) include assays disclosed in Berger et al., Gene | highly preferred embodiment of the invention includes a method for |
| | | 66: 1-10 (1998); Cullen and Malm, Methods in Enzymol 216: 362-368 (1992); Henthorn et | stimulating (e.g., increasing) IL-2 production. An alternative highly preferred |
| | | al., Proc Natl Acad Sci USA 85: 6342-6346 (1988); McGuire and Iacobelli, J Immunol | embodiment of the invention includes a method for inhibiting (e.g., reducing) |
| | | 159(3): 1319-1327 (1997); Parra et al., J Immunol 166(4): 2437-2443 (2001); and Butscher | IL-2 production. Additional highly preferred indications include |
| | | et al., J Biol Chem 3(1): 552-560 (1998), the contents of each of which are herein | inflammation and inflammatory disorders. Highly preferred indications |
| | | incorporated by reference in its entirety. T cells that may be used according to these | include autoimmune diseases (e.g., rheumatoid arthritis, systemic lupus |
| | | assays are publicly available (e.g., through the ATCC ™). Exemplary human T cells that | erythematosis, multiple sclerosis and/or as described below), |
| | | may be used according to these assays include the JURKAT cell line, which is a | immunodeficiencies (e.g., as described below), boosting a T cell-mediated |
| | | suspension culture of leukemia cells that produce IL-2 when stimulated. | immune response, and suppressing a T cell-mediated immune response. An |
| | | | additional highly preferred indication includes infection (e.g., AIDS, and/or as |
| | | | described below under “Infectious Disease”). Highly preferred |
| | | | indications include neoplastic diseases (e.g., melanoma, renal cell carcinoma, |
| | | | leukemia, lymphoma, and/or as described below under “Hyperproliferative |
| | | | Disorders”). Highly preferred indications include neoplasms and cancers, such |
| | | | as, for example, melanoma (e.g., metastatic melanoma), renal cell carcinoma |
| | | | (e.g., metastatic renal cell carcinoma), leukemia, lymphoma (e.g., T cell |
| | | | lymphoma), and prostate, breast, lung, colon, pancreatic, esophageal, stomach, |
| | | | brain, liver and urinary cancer. Other preferred indications include benign |
| | | | dysproliferative disorders and pre-neoplastic conditions, such as, for example, |
| | | | hyperplasia, metaplasia, and/or dysplasia. A highly preferred indication is |
| | | | infection (e.g., tuberculosis, infections associated with granulomatous disease, |
| | | | and osteoporosis, and/or an infectious disease as described below under |
| | | | “Infectious Disease”). A highly preferred indication is AIDS. Additional |
| | | | highly preferred indications include suppression of immune reactions to |
| | | | transplanted organs and/or tissues, uveitis, psoriasis, and tropical spastic |
| | | | paraparesis. Preferred indications include blood disorders (e.g., as |
| | | | described below under “Immune Activity”, “Blood-Related Disorders”, and/or |
| | | | “Cardiovascular Disorders”). Preferred indications also include anemia, |
| | | | pancytopenia, leukopenia, thrombocytopenia, Hodgkin's disease, acute |
| | | | lymphocytic anemia (ALL), plasmacytomas, multiple myeloma, Burkitt's |
| | | | lymphoma, arthritis, granulomatous disease, inflammatory bowel disease, |
| | | | sepsis, neutropenia, neutrophilia, hemophilia, hypercoagulation, diabetes |
| | | | mellitus, endocarditis, meningitis, Lyme Disease, asthma and allergy. |
| 21 | Activation of transcription | Assays for the activation of transcription through the CD28 response element are well- | A highly preferred embodiment of the invention includes a method for |
| | through CD28 response | known in the art and may be used or routinely modified to assess the ability of | stimulating T cell proliferation. An alternative highly preferred embodiment |
| | element in immune cells | polypeptides of the invention (including antibodies and agonists or antagonists of the | of the invention includes a method for inhibiting T cell proliferation. A |
| | (such as T-cells). | invention) to stimulate IL-2 expression in T cells. Exemplary assays for transcription | highly preferred embodiment of the invention includes a method for activating |
| | | through the CD28 response element that may be used or routinely modified to test CD28- | T cells. An alternative highly preferred embodiment of the invention includes |
| | | response element activity of polypeptides of the invention (including antibodies and | a method for inhibiting the activation of and/or inactivating T cells. A |
| | | agonists or antagonists of the invention) include assays disclosed in Berger et al., Gene | highly preferred embodiment of the invention includes a method for |
| | | 66: 1-10 (1998); Cullen and Malm, Methods in Enzymol 216: 362-368 (1992); Henthorn et | stimulating (e.g., increasing) IL-2 production. An alternative highly preferred |
| | | al., Proc Natl Acad Sci USA 85: 6342-6346 (1988); McGuire and lacobelli, J Immunol | embodiment of the invention includes a method for inhibiting (e.g., reducing) |
| | | 159(3): 1319-1327 (1997); Parra et al., J Immunol 166(4): 2437-2443 (2001); and Butscher | IL-2 production. Additional highly preferred indications include |
| | | et al., J Biol Chem 3(1): 552-560 (1998), the contents of each of which are herein | inflammation and inflammatory disorders. Highly preferred indications |
| | | incorporated by reference in its entirety. T cells that may be used according to these | include autoimmune diseases (e.g., rheumatoid arthritis, systemic lupus |
| | | assays are publicly available (e.g., through the ATCC ™). Exemplary human T cells that | erythematosis, multiple sclerosis and/or as described below), |
| | | may be used according to these assays include the SUPT cell line, which is a suspension | immunodeficiencies (e.g., as described below), boosting a T cell-mediated |
| | | culture of IL-2 and IL-4 responsive T cells. | immune response, and suppressing a T cell-mediated immune response. |
| | | | Highly preferred indications include neoplastic diseases (e.g., melanoma, |
| | | | renal cell carcinoma, leukemia, lymphoma, and/or as described below under |
| | | | “Hyperproliferative Disorders”). Highly preferred indications include |
| | | | neoplasms and cancers, such as, for example, melanoma (e.g., metastatic |
| | | | melanoma), renal cell carcinoma (e.g., metastatic renal cell carcinoma), |
| | | | leukemia, lymphoma (e.g,. T cell lymphoma), and prostate, breast, lung, |
| | | | colon, pancreatic, esophageal, stomach, brain, liver and urinary cancer. Other |
| | | | preferred indications include benign dysproliferative disorders and pre- |
| | | | neoplastic conditions, such as, for example, hyperplasia, metaplasia, and/or |
| | | | dysplasia. A highly preferred indication includes infection (e.g., AIDS, |
| | | | tuberculosis, infections associated with granulomatous disease, and |
| | | | osteoporosis, and/or as described below under “Infectious Disease”). A |
| | | | highly preferred indication is AIDS. Additional highly preferred indications |
| | | | include suppression of immune reactions to transplanted organs and/or tissues, |
| | | | uveitis, psoriasis, and tropical spastic paraparesis. Preferred indications |
| | | | include blood disorders (e.g., as described below under “Immune Activity”, |
| | | | “Blood-Related Disorders”, and/or “Cardiovascular Disorders”). Preferred |
| | | | indications also include anemia, pancytopenia, leukopenia, thrombocytopenia, |
| | | | Hodgkin's disease, acute lymphocytic anemia (ALL), plasmacytomas, |
| | | | multiple myeloma, Burkitt's lymphoma, arthritis, granulomatous disease, |
| | | | inflammatory bowel disease, sepsis, neutropenia, neutrophilia, hemophilia, |
| | | | hypercoagulation, diabetes mellitus, endocarditis, meningitis, Lyme Disease, |
| | | | asthma and allergy. |
| 22 | Activation of transcription | Assays for the activation of transcription through the Gamma Interferon Activation Site | Highly preferred indications include asthma, allergy, hypersensitivity |
| | through GAS response | (GAS) response element are well-known in the art and may be used or routinely modified | reactions, inflammation, and inflammatory disorders. Additional highly |
| | element in immune cells | to assess the ability of polypeptides of the invention (including antibodies and agonists or | preferred indications include immune and hematopoietic disorders (e.g., as |
| | (such as eosinophils). | antagonists of the invention) to modulate gene expression (commonly via STAT | described below under “Immune Activity”, and “Blood-Related Disorders”), |
| | | transcription factors) involved in a wide variety of cell functions. Exemplary assays for | autoimmune diseases (e.g., rheumatoid arthritis, systemic lupus erythematosis, |
| | | transcription through the GAS response element that may be used or routinely modified to | Crohn''s disease, multiple sclerosis and/or as described below), |
| | | test GAS-response element activity of polypeptides of the invention (including antibodies | immunodeficiencies (e.g., as described below), boosting an eosinophil- |
| | | and agonists or antagonists of the invention) include assays disclosed in Berger et al., Gene | mediated immune response and, alternatively, suppressing an eosinophil- |
| | | 66: 1-10 (1998); Cullen and Malm, Methods in Enzymol 216: 362-368 (1992); Henthorn et | mediated immune response. |
| | | al., Proc Natl Acad Sci USA 85: 6342-6346 (1988); Matikainen et al., Blood 93(6): 1980-1991 | |
| | | (1999); and Henttinen et al., J Immunol 155(10): 4582-4587 (1995); the contents of | |
| | | each of which are herein incorporated by reference in its entirety. Moreover, exemplary | |
| | | assays that may be used or routinely modified to assess the ability of polypeptides of the | |
| | | invention (including antibodies and agonists or antagonists of the invention) to activate or | |
| | | inhibit activation of immune cells include assays disclosed and/or cited in: Mayumi M., | |
| | | “EoL-1, a human eosinophilic cell line” Leuk Lymphoma; Jun; 7(3): 243-50 (1992); | |
| | | Bhattacharya S, “Granulocyte macrophage colony-stimulating factor and interleukin-5 | |
| | | activate STAT5 and induce CIS1 mRNA in human peripheral blood eosinophils” Am J | |
| | | Respir Cell Mol Biol; Mar; 24(3): 312-6 (2001); and, Du J, et al., “Engagement of the CrkL | |
| | | adapter in interleukin-5 signaling in eosinophils” J Biol Chem; Oct 20; 275(42): 33167-75 | |
| | | (2000); the contents of each of which are herein incorporated by reference in its entirety. | |
| | | Exemplary cells that may be used according to these assays include eosinophils. | |
| | | Eosinophils are a type of immune cell important in the late stage of allergic reactions; they | |
| | | are recruited to tissues and mediate the inflammtory response of late stage allergic | |
| | | reaction. Increases in GAS mediated transcription in eosinophils is typically a result of | |
| | | STAT activation, normally a direct consequence of interleukin or other cytokine receptor | |
| | | stimulation (e.g. IL3, IL5 or GMCSF). | |
| 23 | Activation of transcription | Assays for the activation of transcription through the Gamma Interferon Activation Site | Preferred embodiments of the invention include using polypeptides of the |
| | through GAS response | (GAS) response element are well-known in the art and may be used or routinely modified | invention (or antibodies, agonists, or antagonists thereof) in detection, |
| | element in immune cells | to assess the ability of polypeptides of the invention (including antibodies and agonists or | diagnosis, prevention, and/or treatment of Inflammation, Infection, Cancer, |
| | (such as monocytes). | antagonists of the invention) to regulate STAT transcription factors and modulate gene | Hypersensitivity, and Atherosclerosis. |
| | | expression involved in a wide variety of cell functions. Exemplary assays for transcription | |
| | | through the GAS response element that may be used or routinely modified to test GAS- | |
| | | response element activity of polypeptides of the invention (including antibodies and | |
| | | agonists or antagonists of the invention) include assays disclosed in: Gustafson KS, et al., J | |
| | | Biol Chem, 271(33): 20035-20046 (1996); Eilers A, et al., Immunobiology, 193(2-4): 328-333 | |
| | | (1995); Berger et al., Gene 66: 1-10 (1998); Cullen and Malm, Methods in Enzymol | |
| | | 216: 362-368 (1992); Henthorn et al., Proc Natl Acad Sci USA 85: 6342-6346 (1988); | |
| | | Matikainen et al., Blood 93(6): 1980-1991 (1999); and Henttinen et al., J Immunol | |
| | | 155(10): 4582-4587 (1995), the contents of each of which are herein incorporated by | |
| | | reference in its entirety. Exemplary immune cells that may be used according to these | |
| | | assays are publicly available (e.g., through the ATCC ™). Exemplary immune cells that | |
| | | may be used according to these assays include the U937 cell line, which is a monocytic | |
| | | cell line. | |
| 24 | Activation of transcription | Assays for the activation of transcription through the Gamma Interferon Activation Site | Highly preferred indications include neoplastic diseases (e.g., leukemia, |
| | through GAS response | (GAS) response element are well-known in the art and may be used or routinely modified | lymphoma, and/or as described below under “Hyperproliferative Disorders”). |
| | element in immune cells | to assess the ability of polypeptides of the invention (including antibodies and agonists or | Highly preferred indications include neoplasms and cancers, such as, for |
| | (such as T-cells). | antagonists of the invention) to regulate STAT transcription factors and modulate gene | example, leukemia, lymphoma (e.g., T cell lymphoma, Burkitt's lymphoma, |
| | | expression involved in a wide variety of cell functions. Exemplary assays for transcription | non-Hodgkins lymphoma, Hodgkin''s disease), melanoma, and prostate, |
| | | through the GAS response element that may be used or routinely modified to test GAS- | breast, lung, colon, pancreatic, esophageal, stomach, brain, liver and urinary |
| | | response element activity of polypeptides of the invention (including antibodies and | cancer. Other preferred indications include benign dysproliferative disorders |
| | | agonists or antagonists of the invention) include assays disclosed in Berger et al., Gene | and pre-neoplastic conditions, such as, for example, hyperplasia, metaplasia, |
| | | 66: 1-10 (1998); Cullen and Malm, Methods in Enzymol 216: 362-368 (1992); Henthorn et | and/or dysplasia. Preferred indications include autoimmune diseases (e.g., |
| | | al., Proc Natl Acad Sci USA 85: 6342-6346 (1988); Matikainen et al., Blood 93(6): 1980-1991 | rheumatoid arthritis, systemic lupus erythematosis, multiple sclerosis and/or |
| | | (1999); and Henttinen et al., J Immunol 155(10): 4582-4587 (1995), the contents of | as described below), immunodeficiencies (e.g., as described below), boosting |
| | | each of which are herein incorporated by reference in its entirety. Exemplary human T | a T cell-mediated immune response, and suppressing a T cell-mediated |
| | | cells, such as the MOLT4 cell line, that may be used according to these assays are publicly | immune response. Additional preferred indications include inflammation and |
| | | available (e.g., through the ATCC ™). | inflammatory disorders. Highly preferred indications include blood |
| | | | disorders (e.g., as described below under “Immune Activity”, “Blood-Related |
| | | | Disorders”, and/or “Cardiovascular Disorders”), and infection (e.g., viral |
| | | | infections, tuberculosis, infections associated with chronic granulomatosus |
| | | | disease and malignant osteoporosis, and/or an infectious disease as described |
| | | | below under “Infectious Disease”). An additional preferred indication is |
| | | | idiopathic pulmonary fibrosis. Preferred indications include anemia, |
| | | | pancytopenia, leukopenia, thrombocytopenia, acute lymphocytic anemia |
| | | | (ALL), plasmacytomas, multiple myeloma, arthritis, AIDS, granulomatous |
| | | | disease, inflammatory bowel disease, sepsis, neutropenia, neutrophilia, |
| | | | psoriasis, suppression of immune reactions to transplanted organs and tissues, |
| | | | hemophilia, hypercoagulation, diabetes mellitus, endocarditis, meningitis, |
| | | | Lyme Disease, and asthma and allergy. |
| 25 | Activation of transcription | Assays for the activation of transcription through the Gamma Interferon Activation Site | Highly preferred indications include neoplastic diseases (e.g., leukemia, |
| | through GAS response | (GAS) response element are well-known in the art and may be used or routinely modified | lymphoma, and/or as described below under “Hyperproliferative Disorders”). |
| | element in immune cells | to assess the ability of polypeptides of the invention (including antibodies and agonists or | Highly preferred indications include neoplasms and cancers, such as, for |
| | (such as T-cells). | antagonists of the invention) to regulate STAT transcription factors and modulate gene | example, leukemia, lymphoma (e.g., T cell lymphoma, Burkitt's lymphoma, |
| | | expression involved in a wide variety of cell functions. Exemplary assays for transcription | non-Hodgkins lymphoma, Hodgkin''s disease), melanoma, and prostate, |
| | | through the GAS response element that may be used or routinely modified to test GAS- | breast, lung, colon, pancreatic, esophageal, stomach, brain, liver and urinary |
| | | response element activity of polypeptides of the invention (including antibodies and | cancer. Other preferred indications include benign dysproliferative disorders |
| | | agonists or antagonists of the invention) include assays disclosed in Berger et al., Gene | and pre-neoplastic conditions, such as, for example, hyperplasia, metaplasia, |
| | | 66: 1-10 (1998); Cullen and Malm, Methods in Enzymol 216: 362-368 (1992); Henthorn et | and/or dysplasia. Preferred inidications include autoimmune diseases (e.g., |
| | | al., Proc Natl Acad Sci USA 85: 6342-6346 (1988); Matikainen et al., Blood 93(6): 1980-1991 | rheumatoid arthritis, systemic lupus erythematosis, multiple sclerosis and/or |
| | | (1999); and Henttinen et al., J Immunol 155(10): 4582-4587 (1995), the contents of | as described below), immunodeficiencies (e.g., as described below), boosting |
| | | each of which are herein incorporated by reference in its entirety. Exemplary human T | a T cell-mediated immune response, and suppressing a T cell-mediated |
| | | cells, such as the SUPT cell line, that may be used according to these assays are publicly | immune response. Additional preferred indications include inflammation and |
| | | available (e.g., through the ATCC ™). | inflammatory disorders. Highly preferred indications include blood disorders |
| | | | (e.g., as described below under “Immune Activity”, “Blood-Related |
| | | | Disorders”, and/or “Cardiovascular Disorders”), and infection (e.g., viral |
| | | | infections, tuberculosis, infections associated with chronic granulomatosus |
| | | | disease and malignant osteoporosis, and/or an infectious disease as described |
| | | | below under “Infectious Disease”). An additional preferred indication is |
| | | | idiopathic pulmonary fibrosis. Preferred indications include anemia, |
| | | | pancytopenia, leukopenia, thrombocytopenia, acute lymphocytic anemia |
| | | | (ALL), plasmacytomas, multiple myeloma, arthritis, AIDS, granulomatous |
| | | | disease, inflammatory bowel disease, sepsis, neutropenia, neutrophilia, |
| | | | psoriasis, suppression of immune reactions to transplanted organs and tissues, |
| | | | hemophilia, hypercoagulation, diabetes mellitus, endocarditis, meningitis, |
| | | | Lyme Disease, and asthma and allergy. |
| 26 | Activation of transcription | Assays for the activation of transcription through the Gamma Interferon Activation Site | Highly preferred indications include neoplastic diseases (e.g., leukemia, |
| | through GAS response | (GAS) response element are well-known in the art and may be used or routinely modified | lymphoma, and/or as described below under “Hyperproliferative Disorders”). |
| | element in immune cells | to assess the ability of polypeptides of the invention (including antibodies and agonists or | Highly preferred indications include neoplasms and cancers, such as, for |
| | (such as T-cells). | antagonists of the invention) to regulate STAT transcription factors and modulate gene | example, leukemia, lymphoma (e.g., T cell lymphoma, Burkitt's lymphoma, |
| | | expression involved in a wide variety of cell functions. Exemplary assays for transcription | non-Hodgkins lymphoma, Hodgkin''s disease), melanoma, and prostate, |
| | | through the GAS response element that may be used or routinely modified to test GAS- | breast, lung, colon, pancreatic, esophageal, stomach, brain, liver and urinary |
| | | response element activity of polypeptides of the invention (including antibodies and | cancer. Other preferred indications include benign dysproliferative disorders |
| | | agonists or antagonists of the invention) include assays disclosed in Berger et al., Gene | and pre-neoplastic conditions, such as, for example, hyperplasia, metaplasia, |
| | | 66: 1-10 (1998); Cullen and Malm, Methods in Enzymol 216: 362-368 (1992); Henthorn et | and/or dysplasia. Preferred indications include autoimmune diseases (e.g., |
| | | al., Proc Natl Acad Sci USA 85: 6342-6346 (1988); Matikainen et al., Blood 93(6): 1980-1991 | rheumatoid arthritis, systemic lupus erythematosis, multiple sclerosis and/or |
| | | (1999); and Henttinen et al., J Immunol 155(10): 4582-4587 (1995), the contents of | as described below), immunodeficiencies (e.g., as described below), boosting |
| | | each of which are herein incorporated by reference in its entirety. Exemplary mouse T | a T cell-mediated immune response, and suppressing a T cell-mediated |
| | | cells that may be used according to these assays are publicly available (e.g., through the | immune response. Additional preferred indications include inflammation and |
| | | ATCC ™). Exemplary T cells that may be used according to these assays include the | inflammatory disorders. Highly preferred indications include blood |
| | | CTLL cell line, which is a suspension culture of IL-2 dependent cytotoxic T cells. | disorders (e.g., as described below under “Immune Activity”, “Blood-Related |
| | | | Disorders”, and/or “Cardiovascular Disorders”), and infection (e.g., viral |
| | | | infections, tuberculosis, infections associated with chronic granulomatosus |
| | | | disease and malignant osteoporosis, and/or an infectious disease as described |
| | | | below under “Infectious Disease”). An additional preferred indication is |
| | | | idiopathic pulmonary fibrosis. Preferred inidications include anemia, |
| | | | pancytopenia, leukopenia, thrombocytopenia, acute lymphocytic anemia |
| | | | (ALL), plasmacytomas, multiple myeloma, arthritis, AIDS, granulomatous |
| | | | disease, inflammatory bowel disease, sepsis, neutropenia, neutrophilia, |
| | | | psoriasis, suppression of immune reactions to transplanted organs and tissues, |
| | | | hemophilia, hypercoagulation, diabetes mellitus, endocarditis, meningitis, |
| | | | Lyme Disease, and asthma and allergy. |
| 27 | Activation of transcription | This reporter assay measures activation of the GATA-3 signaling pathway in HMC-1 | Highly preferred indications include allergy, asthma, and rhinitis. Additional |
| | through GATA-3 response | human mast cell line. Activation of GATA-3 in mast cells has been linked to cytokine and | preferred indications include infection (e.g., an infectious disease as described |
| | element in immune cells | chemokine production. Assays for the activation of transcription through the GATA3 | below under “Infectious Disease”), and inflammation and inflammatory |
| | (such as mast cells). | response element are well-known in the art and may be used or routinely modified to | disorders. Preferred indications also include blood disorders (e.g., as |
| | | assess the ability of polypeptides of the invention (including antibodies and agonists or | described below under “Immune Activity”, “Blood-Related Disorders”, and/or |
| | | antagonists of the invention) to regulate GATA3 transcription factors and modulate | “Cardiovascular Disorders”). Preferred indications include autoimmune |
| | | expression of mast cell genes important for immune response development. Exemplary | diseases (e.g., rheumatoid arthritis, systemic lupus erythematosis, multiple |
| | | assays for transcription through the GATA3 response element that may be used or | sclerosis and/or as described below) and immunodeficiencies (e.g., as |
| | | routinely modified to test GATA3-response element activity of polypeptides of the | described below). Preferred indications include neoplastic diseases (e.g., |
| | | invention (including antibodies and agonists or antagonists of the invention) include assays | leukemia, lymphoma, melanoma, prostate, breast, lung, colon, pancreatic, |
| | | disclosed in Berger et al., Gene 66: 1-10 (1998); Cullen and Malm, Methods in Enzymol | esophageal, stomach, brain, liver, and urinary tract cancers and/or as |
| | | 216: 362-368 (1992); Henthorn et al., Proc Natl Acad Sci USA 85: 6342-6346 (1988); | described below under “Hyperproliferative Disorders”). Other preferred |
| | | Flavell et al., Cold Spring Harb Symp Quant Biol 64: 563-571 (1999); Rodriguez-Palmero | indications include benign dysproliferative disorders and pre-neoplastic |
| | | et al., Eur J Immunol 29(12): 3914-3924 (1999); Zheng and Flavell, Cell 89(4): 587-596 | conditions, such as, for example, hyperplasia, metaplasia, and/or dysplasia. |
| | | (1997); and Henderson et al., Mol Cell Biol 14(6): 4286-4294 (1994), the contents of each | Preferred indications include anemia, pancytopenia, leukopenia, |
| | | of which are herein incorporated by reference in its entirety. Mast cells that may be used | thrombocytopenia, leukemias, Hodgkin's disease, acute lymphocytic anemia |
| | | according to these assays are publicly available (e.g., through the ATCC ™). Exemplary | (ALL), plasmacytomas, multiple myeloma, Burkitt's lymphoma, arthritis, |
| | | human mast cells that may be used according to these assays include the HMC-1 cell line, | AIDS, granulomatous disease, inflammatory bowel disease, sepsis, |
| | | which is an immature human mast cell line established from the peripheral blood of a | neutropenia, neutrophilia, psoriasis, suppression of immune reactions to |
| | | patient with mast cell leukemia, and exhibits many characteristics of immature mast cells. | transplanted organs and tissues, hemophilia, hypercoagulation, diabetes |
| | | | mellitus, endocarditis, meningitis, and Lyme Disease. |
| 28 | Activation of transcription | Assays for the activation of transcription through the GATA3 response element are well- | A highly preferred indication includes allergy. A highly preferred |
| | through GATA-3 response | known in the art and may be used or routinely modified to assess the ability of | indication includes asthma. A highly preferred indication includes rhinitis. |
| | element in immune cells | polypeptides of the invention (including antibodies and agonists or antagonists of the | Additional highly preferred indications include infection (e.g., an infectious |
| | (such as T-cells). | invention) to regulate GATA3 transcription factors and modulate expression of genes | disease as described below under “Infectious Disease”), and inflammation and |
| | | important for Th2 immune response development. Exemplary assays for transcription | inflammatory disorders. Preferred indications include blood disorders |
| | | through the GATA3 response element that may be used or routinely modified to test | (e.g., as described below under “Immune Activity”, “Blood-Related |
| | | GATA3-response element activity of polypeptides of the invention (including antibodies | Disorders”, and/or “Cardiovascular Disorders”). Preferred indications include |
| | | and agonists or antagonists of the invention) include assays disclosed in Berger et al., Gene | autoimmune diseases (e.g., rheumatoid arthritis, systemic lupus erythematosis, |
| | | 66: 1-10 (1998); Cullen and Malm, Methods in Enzymol 216: 362-368 (1992); Henthorn et | multiple sclerosis and/or as described below) and immunodeficiencies (e.g., as |
| | | al., Proc Natl Acad Sci USA 85: 6342-6346 (1988); Flavell et al., Cold Spring Harb Symp | described below). Preferred indications include neoplastic diseases (e.g., |
| | | Quant Biol 64: 563-571 (1999); Rodriguez-Palmero et al., Eur J Immunol 29(12): 3914-3924 | leukemia, lymphoma, melanoma, and/or as described below under |
| | | (1999); Zheng and Flavell, Cell 89(4): 587-596 (1997); and Henderson et al., Mol | “Hyperproliferative Disorders”). Preferred indications include neoplasms and |
| | | Cell Biol 14(6): 4286-4294 (1994), the contents of each of which are herein incorporated | cancer, such as, for example, leukemia, lymphoma, melanoma, and prostate, |
| | | by reference in its entirety. T cells that may be used according to these assays are publicly | breast, lung, colon, pancreatic, esophageal, stomach, brain, liver and urinary |
| | | available (e.g., through the ATCC ™). Exemplary mouse T cells that may be used | cancer. Other preferred indications include benign dysproliferative disorders |
| | | according to these assays include the HT2 cell line, which is a suspension culture of IL-2 | and pre-neoplastic conditions, such as, for example, hyperplasia, metaplasia, |
| | | dependent T cells that also respond to IL-4. | and/or dysplasia. Preferred indications include anemia, pancytopenia, |
| | | | leukopenia, thrombocytopenia, leukemias, Hodgkin's disease, acute |
| | | | lymphocytic anemia (ALL), plasmacytomas, multiple myeloma, Burkitt's |
| | | | lymphoma, arthritis, AIDS, granulomatous disease, inflammatory bowel |
| | | | disease, sepsis, neutropenia, neutrophilia, psoriasis, suppression of immune |
| | | | reactions to transplanted organs and tissues, hemophilia, hypercoagulation, |
| | | | diabetes mellitus, endocarditis, meningitis, and Lyme Disease. |
| 29 | Activation of transcription | This reporter assay measures activation of the NFAT signaling pathway in HMC-1 human | Highly preferred indications include allergy, asthma, and rhinitis. Additional |
| | through NFAT response | mast cell line. Activation of NFAT in mast cells has been linked to cytokine and | preferred indications include infection (e.g., an infectious disease as described |
| | element in immune cells | chemokine production. Assays for the activation of transcription through the Nuclear | below under “Infectious Disease”), and inflammation and inflammatory |
| | (such as mast cells). | Factor of Activated T cells (NFAT) response element are well-known in the art and may | disorders. Preferred indications also include blood disorders (e.g., as |
| | | be used or routinely modified to assess the ability of polypeptides of the invention | described below under “Immune Activity”, “Blood-Related Disorders”, and/or |
| | | (including antibodies and agonists or antagonists of the invention) to regulate NFAT | “Cardiovascular Disorders”). Preferred indications include autoimmune |
| | | transcription factors and modulate expression of genes involved in immunomodulatory | diseases (e.g., rheumatoid arthritis, systemic lupus erythematosis, multiple |
| | | functions. Exemplary assays for transcription through the NFAT response element that | sclerosis and/or as described below) and immunodeficiencies (e.g., as |
| | | may be used or routinely modified to test NFAT-response element activity of polypeptides | described below). Preferred indications include neoplastic diseases (e.g., |
| | | of the invention (including antibodies and agonists or antagonists of the invention) include | leukemia, lymphoma, melanoma, prostate, breast, lung, colon, pancreatic, |
| | | assays disclosed in Berger et al., Gene 66: 1-10 (1998); Cullen and Malm, Methods in | esophageal, stomach, brain, liver, and urinary tract cancers and/or as |
| | | Enzymol 216: 362-368 (1992); Henthorn et al., Proc Natl Acad Sci USA 85: 6342-6346 | described below under “Hyperproliferative Disorders”). Other preferred |
| | | (1988); De Boer et al., Int J Biochem Cell Biol 31(10): 1221-1236 (1999); Ali et al., J | indications include benign dysproliferative disorders and pre-neoplastic |
| | | Immunol 165(12): 7215-7223 (2000); Hutchinson and McCloskey, J Biol Chem | conditions, such as, for example, hyperplasia, metaplasia, and/or dysplasia. |
| | | 270(27): 16333-16338 (1995), and Turner et al., J Exp Med 188: 527-537 (1998), the | Preferred indications include anemia, pancytopenia, leukopenia, |
| | | contents of each of which are herein incorporated by reference in its entirety. Mast cells | thrombocytopenia, leukemias, Hodgkin's disease, acute lymphocytic anemia |
| | | that may be used according to these assays are publicly available (e.g., through the | (ALL), plasmacytomas, multiple myeloma, Burkitt's lymphoma, arthritis, |
| | | ATCC ™). Exemplary human mast cells that may be used according to these assays | AIDS, granulomatous disease, inflammatory bowel disease, sepsis, |
| | | include the HMC-1 cell line, which is an immature human mast cell line established from | neutropenia, neutrophilia, psoriasis, suppression of immune reactions to |
| | | the peripheral blood of a patient with mast cell leukemia, and exhibits many characteristics | transplanted organs and tissues, hemophilia, hypercoagulation, diabetes |
| | | of immature mast cells. | mellitus, endocarditis, meningitis, and Lyme Disease. |
| 30 | Activation of transcription | Assays for the activation of transcription through the Nuclear Factor of Activated T cells | Highly preferred indications include blood disorders (e.g., as described |
| | through NFAT response | (NFAT) response element are well-known in the art and may be used or routinely modified | below under “Immune Activity”, “Blood-Related Disorders”, and/or |
| | element in immune cells | to assess the ability of polypeptides of the invention (including antibodies and agonists or | “Cardiovascular Disorders”). Highly preferred indications include |
| | (such as natural killer cells). | antagonists of the invention) to regulate NFAT transcription factors and modulate | autoimmune diseases (e.g., rheumatoid arthritis, systemic lupus erythematosis, |
| | | expression of genes involved in immunomodulatory functions. Exemplary assays for | multiple sclerosis and/or as described below), immunodeficiencies (e.g., as |
| | | transcription through the NFAT response element that may be used or routinely modified | described below), boosting a T cell-mediated immune response, and |
| | | to test NFAT-response element activity of polypeptides of the invention (including | suppressing a T cell-mediated immune response. Additional highly preferred |
| | | antibodies and agonists or antagonists of the invention) include assays disclosed in Berger | indications include inflammation and inflammatory disorders. An additional |
| | | et al., Gene 66: 1-10 (1998); Cullen and Malm, Methods in Enzymol 216: 362-368 (1992); | highly preferred indication is infection (e.g., an infectious disease as described |
| | | Henthorn et al., Proc Natl Acad Sci USA 85: 6342-6346 (1988); Aramburu et al., J Exp | below under “Infectious Disease”). Preferred indications include |
| | | Med 182(3): 801-810 (1995); De Boer et al., Int J Biochem Cell Biol 31(10): 1221-1236 | neoplastic diseases (e.g., leukemia, lymphoma, and/or as described below |
| | | (1999); Fraser et al., Eur J Immunol 29(3): 838-844 (1999); and Yeseen et al., J Biol Chem | under “Hyperproliferative Disorders”). Preferred indications include |
| | | 268(19): 14285-14293 (1993), the contents of each of which are herein incorporated by | neoplasms and cancers, such as, for example, leukemia, lymphoma, and |
| | | reference in its entirety. NK cells that may be used according to these assays are publicly | prostate, breast, lung, colon, pancreatic, esophageal, stomach, brain, liver and |
| | | available (e.g., through the ATCC ™). Exemplary human NK cells that may be used | urinary cancer. Other preferred indications include benign dysproliferative |
| | | according to these assays include the NK-YT cell line, which is a human natural killer cell | disorders and pre-neoplastic conditions, such as, for example, hyperplasia, |
| | | line with cytolytic and cytotoxic activity. | metaplasia, and/or dysplasia. Preferred indications also include anemia, |
| | | | pancytopenia, leukopenia, thrombocytopenia, Hodgkin's disease, acute |
| | | | lymphocytic anemia (ALL), plasmacytomas, multiple myeloma, Burkitt's |
| | | | lymphoma, arthritis, AIDS, granulomatous disease, inflammatory bowel |
| | | | disease, sepsis, neutropenia, neutrophilia, psoriasis, suppression of immune |
| | | | reactions to transplanted organs and tissues, hemophilia, hypercoagulation, |
| | | | diabetes mellitus, endocarditis, meningitis, Lyme Disease, asthma and allergy. |
| 31 | Activation of transcription | Assays for the activation of transcription through the Nuclear Factor of Activated T cells | Highly preferred indications include blood disorders (e.g., as described |
| | through NFAT response | (NFAT) response element are well-known in the art and may be used or routinely modified | below under “Immune Activity”, “Blood-Related Disorders”, and/or |
| | element in immune cells | to assess the ability of polypeptides of the invention (including antibodies and agonists or | “Cardiovascular Disorders”). Highly preferred indications include |
| | (such as T-cells). | antagonists of the invention) to regulate NFAT transcription factors and modulate | autoimmune diseases (e.g., rheumatoid arthritis, systemic lupus erythematosis, |
| | | expression of genes involved in immunomodulatory functions. Exemplary assays for | multiple sclerosis and/or as described below), immunodeficiencies (e.g., as |
| | | transcription through the NFAT response element that may be used or routinely modified | described below), boosting a T cell-mediated immune response, and |
| | | to test NFAT-response element activity of polypeptides of the invention (including | suppressing a T cell-mediated immune response. Additional highly preferred |
| | | antibodies and agonists or antagonists of the invention) include assays disclosed in Berger | indications include inflammation and inflammatory disorders. An additional |
| | | et al., Gene 66: 1-10 (1998); Cullen and Malm, Methods in Enzymol 216: 362-368 (1992); | highly preferred indication is infection (e.g., an infectious disease as described |
| | | Henthorn et al., Proc Natl Acad Sci USA 85: 6342-6346 (1988); Serfling et al., Biochim | below under “Infectious Disease”). Preferred indications include |
| | | Biophys Acta 1498(1): 1-18 (2000); De Boer et al., Int J Biochem Cell Biol 31(10): 1221-1236 | neoplastic diseases (e.g., leukemia, lymphoma, and/or as described below |
| | | (1999); Fraser et al., Eur J Immunol 29(3): 838-844 (1999); and Yeseen et al., J Biol | under “Hyperproliferative Disorders”). Preferred indications include |
| | | Chem 268(19): 14285-14293 (1993), the contents of each of which are herein incorporated | neoplasms and cancers, such as, for example, leukemia, lymphoma, and |
| | | by reference in its entirety. T cells that may be used according to these assays are publicly | prostate, breast, lung, colon, pancreatic, esophageal, stomach, brain, liver and |
| | | available (e.g., through the ATCC ™). Exemplary human T cells that may be used | urinary cancer. Other preferred indications include benign dysproliferative |
| | | according to these assays include the SUPT cell line, which is a suspension culture of IL-2 | disorders and pre-neoplastic conditions, such as, for example, hyperplasia, |
| | | and IL-4 responsive T cells. | metaplasia, and/or dysplasia. Preferred indications also include anemia, |
| | | | pancytopenia, leukopenia, thrombocytopenia, Hodgkin's disease, acute |
| | | | lymphocytic anemia (ALL), plasmacytomas, multiple myeloma, Burkitt's |
| | | | lymphoma, arthritis, AIDS, granulomatous disease, inflammatory bowel |
| | | | disease, sepsis, neutropenia, neutrophilia, psoriasis, suppression of immune |
| | | | reactions to transplanted organs and tissues, hemophilia, hypercoagulation, |
| | | | diabetes mellitus, endocarditis, meningitis, Lyme Disease, asthma and allergy. |
| 32 | Activation of transcription | Assays for the activation of transcription through the Nuclear Factor of Activated T cells | Highly preferred indications include blood disorders (e.g., as described |
| | through NFAT response in | (NFAT) response element are well-known in the art and may be used or routinely modified | below under “Immune Activity”, “Blood-Related Disorders”, and/or |
| | immune cells (such as T- | to assess the ability of polypeptides of the invention (including antibodies and agonists or | “Cardiovascular Disorders”). Highly preferred indications include |
| | cells). | antagonists of the invention) to regulate NFAT transcription factors and modulate | autoimmune diseases (e.g., rheumatoid arthritis, systemic lupus erythematosis, |
| | | expression of genes involved in immunomodulatory functions. Exemplary assays for | multiple sclerosis and/or as described below), immunodeficiencies (e.g., as |
| | | transcription through the NFAT response element that may be used or routinely modified | described below), boosting a T cell-mediated immune response, and |
| | | to test NFAT-response element activity of polypeptides of the invention (including | suppressing a T cell-mediated immune response. Additional highly preferred |
| | | antibodies and agonists or antagonists of the invention) include assays disclosed in Berger | indications include inflammation and inflammatory disorders. An additional |
| | | et al., Gene 66: 1-10 (1998); Cullen and Malm, Methods in Enzymol 216: 362-368 (1992); | highly preferred indication is infection (e.g., an infectious disease as described |
| | | Henthorn et al., Proc Natl Acad Sci USA 85: 6342-6346 (1988); Serfling et al., Biochim | below under “Infectious Disease”). Preferred indications include |
| | | Biophys Acta 1498(1): 1-18 (2000); De Boer et al., Int J Biochem Cell Biol 31 (10): 1221-1236 | neoplastic diseases (e.g., leukemia, lymphoma, and/or as described below |
| | | (1999); Fraser et al., Eur J Immunol 29(3): 838-844 (1999); and Yeseen et al., J Biol | under “Hyperproliferative Disorders”). Preferred indications include |
| | | Chem 268(19): 14285-14293 (1993), the contents of each of which are herein incorporated | neoplasms and cancers, such as, for example, leukemia, lymphoma, and |
| | | by reference in its entirety. T cells that may be used according to these assays are publicly | prostate, breast, lung, colon, pancreatic, esophageal, stomach, brain, liver and |
| | | available (e.g., through the ATCC ™). Exemplary human T cells that may be used | urinary cancer. Other preferred indications include benign dysproliferative |
| | | according to these assays include the JURKAT cell line, which is a suspension culture of | disorders and pre-neoplastic conditions, such as, for example, hyperplasia, |
| | | leukemia cells that produce IL-2 when stimulated. | metaplasia, and/or dysplasia. Preferred indications also include anemia, |
| | | | pancytopenia, leukopenia, thrombocytopenia, Hodgkin's disease, acute |
| | | | lymphocytic anemia (ALL), plasmacytomas, multiple myeloma, Burkitt's |
| | | | lymphoma, arthritis, AIDS, granulomatous disease, inflammatory bowel |
| | | | disease, sepsis, neutropenia, neutrophilia, psoriasis, suppression of immune |
| | | | reactions to transplanted organs and tissues, hemophilia, hypercoagulation, |
| | | | diabetes mellitus, endocarditis, meningitis, Lyme Disease, asthma and allergy. |
| 33 | Activation of transcription | Assays for the activation of transcription through the NFKB response element are well- | Preferred embodiments of the invention include using polypeptides of the |
| | through NFKB response | known in the art and may be used or routinely modified to assess the ability of | invention (or antibodies, agonists, or antagonists thereof) in detection, |
| | element in epithelial cells | polypeptides of the invention (including antibodies and agonists or antagonists of the | diagnosis, prevention, and/or treatment of Cancer, Wound Healing, and |
| | (such as HELA cells). | invention) to regulate NFKB transcription factors and modulate expression of epithhelial | Inflamation. Highly preferred indications include neoplastic diseases (e.g., as |
| | | genes. Exemplary assays for transcription through the NFKB response element that may | described below under “Hyperproliferative Disorders”). Highly preferred |
| | | be used or routinely modified to test NFKB-response element activity of polypeptides of | indications include neoplasms and cancers, such as, for example, melanoma, |
| | | the invention (including antibodies and agonists or antagonists of the invention) include | and prostate, breast, lung, colon, pancreatic, esophageal, stomach, brain, liver |
| | | assays disclosed in: Kaltschmidt B, et al., Oncogene, 18(21): 3213-3225 (1999); Beetz A, | and urinary cancer. Other preferred indications include benign dysproliferative |
| | | et al., Int J Radiat Biol, 76(11): 1443-1453 (2000); Berger et al., Gene 66: 1-10 (1998); | disorders and pre-neoplastic conditions, such as, for example, hyperplasia, |
| | | Cullen and Malm, Methods in Enzymol 216: 362-368 (1992); Henthorn et al., Proc Natl | metaplasia, and/or dysplasia. Preferred indications include include |
| | | Acad Sci USA 85: 6342-6346 (1988); Valle Blazquez et al, Immunology 90(3): 455-460 | inflammation and inflammatory disorders. |
| | | (1997); Aramburau et al., J Exp Med 82(3): 801-810 (1995); and Fraser et al., 29(3): 838-844 | |
| | | (1999), the contents of each of which are herein incorporated by reference in its | |
| | | entirety. Epithelial cells that may be used according to these assays are publicly available | |
| | | (e.g., through the ATCC ™). Exemplary epithelial cells that may be used according to | |
| | | these assays include the HELA cell line. | |
| 34 | Activation of transcription | This reporter assay measures activation of the NFkB signaling pathway in Ku812 human | Highly preferred indication includes allergy, asthma, and rhinitis. Additional |
| | through NFKB response | basophil cell line. Assays for the activation of transcription through the NFKB response | highly preferred indications include infection (e.g., an infectious disease as |
| | element in immune cells | element are well-known in the art and may be used or routinely modified to assess the | described below under “Infectious Disease”), and inflammation and |
| | (such as basophils). | ability of polypeptides of the invention (including antibodies and agonists or antagonists of | inflammatory disorders. Preferred indications include immunological and |
| | | the invention) to regulate NFKB transcription factors and modulate expression of | hempatopoietic disorders (e.g., as described below under “Immune Activity”, |
| | | immunomodulatory genes. Exemplary assays for transcription through the NFKB | and “Blood-Related Disorders”). Preferred indications also include |
| | | response element that may be used or rountinely modified to test NFKB-response element | autoimmune diseases (e.g., rheumatoid arthritis, systemic lupus erythematosis, |
| | | activity of polypeptides of the invention (including antibodies and agonists or antagonists | multiple sclerosis and/or as described below) and immunodeficiencies (e.g., as |
| | | of the invention) include assays disclosed in Berger et al., Gene 66: 1-10 (1998); Cullen | described below). Preferred indications also include neoplastic diseases (e.g., |
| | | and Malm, Methods in Enzymol 216: 362-368 (1992); Henthorn et al., Proc Natl Acad Sci | leukemia, lymphoma, melanoma, and/or as described below under |
| | | USA 85: 6342-6346 (1988); Marone et al, Int Arch Allergy Immunol 114(3): 207-17 | “Hyperproliferative Disorders”). Preferred indications include neoplasms and |
| | | (1997), the contents of each of which are herein incorporated by reference in its entirety. | cancer, such as, for example, leukemia, lymphoma, melanoma, and prostate, |
| | | Basophils that may be used according to these assays are publicly available (e.g., through | breast, lung, colon, pancreatic, esophageal, stomach, brain, liver, urinary tract |
| | | the ATCC ™). Exemplary human basophil cell lines that may be used according to these | cancers and as described below under “Hyperproliferative Disorders”. |
| | | assays include Ku812, originally established from a patient with chronic myelogenous | |
| | | leukemia. It is an immature prebasophilic cell line that can be induced to differentiate into | |
| | | mature basophils. | |
| 35 | Activation of transcription | Assays for the activation of transcription through the NFKB response element are well- | Highly preferred indications include asthma, allergy, hypersensitivity |
| | through NFKB response | known in the art and may be used or routinely modified to assess the ability of | reactions, and inflammation. Preferred indications include infection (e.g., an |
| | element in immune cells | polypeptides of the invention (including antibodies and agonists or antagonists of the | infectious disease as described below under “Infectious Disease”), |
| | (such as EOLI cells). | invention) to regulate NFKB transcription factors and modulate expression of | immunological disorders, inflammation and inflammatory disorders (e.g., as |
| | | immunomodulatory genes. Exemplary assays for transcription through the NFKB | described below under “Immune Activity”, and “Blood-Related Disorders”). |
| | | response element that may be used or rountinely modified to test NFKB-response element | Preferred indications include autoimmune diseases (e.g., rheumatoid arthritis, |
| | | activity of polypeptides of the invention (including antibodies and agonists or antagonists | systemic lupus erythematosis, multiple sclerosis and/or as described below) |
| | | of the invention) include assays disclosed in Berger et al., Gene 66: 1-10 (1998); Cullen | and immunodeficiencies (e.g., as described below). |
| | | and Malm, Methods in Enzymol 216: 362-368 (1992); Henthorn et al., Proc Natl Acad Sci | |
| | | USA 85: 6342-6346 (1988); Valle Blazquez et al, Immunology 90(3): 455-460 (1997); | |
| | | Aramburau et al., J Exp Med 82(3): 801-810 (1995); and Fraser et al., 29(3): 838-844 | |
| | | (1999), the contents of each of which are herein incorporated by reference in its entirety. | |
| | | For example, a reporter assay (which measures increases in transcription inducible from a | |
| | | NFkB responsive element in EOL-1 cells) may link the NFKB element to a repeorter gene | |
| | | and binds to the NFKB transcription factor, which is upregulated by cytokines and other | |
| | | factors. Exemplary immune cells that may be used according to these assays include | |
| | | eosinophils such as the human EOL-1 cell line of eosinophils. Eosinophils are a type of | |
| | | immune cell important in the allergic responses; they are recruited to tissues and mediate | |
| | | the inflammtory response of late stage allergic reaction. Eol-1 is a human eosinophil cell | |
| | | line. | |
| 36 | Activation of transcription | This reporter assay measures activation of the NFkB signaling pathway in HMC-1 human | Highly preferred indication includes allergy, asthma, and rhinitis. Additional |
| | through NFKB response | mast cell line. Activation of NFkB in mast cells has been linked to production of certain | highly preferred indications include infection (e.g., an infectious disease as |
| | element in immune cells | cytokines, such as IL-6 and IL-9. Assays for the activation of transcription through the | described below under “Infectious Disease”), and inflammation and |
| | (such as mast cells). | NFKB response element are well-known in the art and may be used or routinely modified | inflammatory disorders. Preferred indications include immunological and |
| | | to assess the ability of polypeptides of the invention (including antibodies and agonists or | hempatopoietic disorders (e.g., as described below under “Immune Activity”, |
| | | antagonists of the invention) to regulate NFKB transcription factors and modulate | and “Blood-Related Disorders”). Preferred indications also include |
| | | expression of immunomodulatory genes. Exemplary assays for transcription through the | autoimmune diseases (e.g., rheumatoid arthritis, systemic lupus erythematosis, |
| | | NFKB response element that may be used or rountinely modified to test NFKB-response | multiple sclerosis and/or as described below) and immunodeficiencies (e.g., as |
| | | element activity of polypeptides of the invention (including antibodies and agonists or | described below). Preferred indications also include neoplastic diseases (e.g., |
| | | antagonists of the invention) include assays disclosed in Berger et al., Gene 66: 1-10 | leukemia, lymphoma, melanoma, and/or as described below under |
| | | (1998); Cullen and Malm, Methods in Enzymol 216: 362-368 (1992); Henthorn et al., Proc | “Hyperproliferative Disorders”). Preferred indications include neoplasms and |
| | | Natl Acad Sci USA 85: 6342-6346 (1988); Stassen et al, J Immunol 166(7): 4391-8 (2001); | cancer, such as, for example, leukemia, lymphoma, melanoma, and prostate, |
| | | and Marquardt and Walker, J Allergy Clin Immunol 105(3): 500-5 (2000), the contents of | breast, lung, colon, pancreatic, esophageal, stomach, brain, liver, urinary tract |
| | | each of which are herein incorporated by reference in its entirety. Mast cells that may be | cancers and as described below under “Hyperproliferative Disorders”. |
| | | used according to these assays are publicly available (e.g., through the ATCC ™). | |
| | | Exemplary human mast cells that may be used according to these assays include the HMC- | |
| | | 1 cell line, which is an immature human mast cell line established from the peripheral | |
| | | blood of a patient with mast cell leukemia, and exhibits many characteristics of immature | |
| | | mast cells. | |
| 37 | Activation of transcription | Assays for the activation of transcription through the NFKB response element are well- | Highly preferred indications include inflammation and inflammatory |
| | through NFKB response | known in the art and may be used or routinely modified to assess the ability of | disorders. Highly preferred indications include blood disorders (e.g., as |
| | element in immune cells | polypeptides of the invention (including antibodies and agonists or antagonists of the | described below under “Immune Activity”, “Blood-Related Disorders”, and/or |
| | (such as natural killer cells). | invention) to regulate NFKB transcription factors and modulate expression of | “Cardiovascular Disorders”). Highly preferred indications include |
| | | immunomodulatory genes. Exemplary assays for transcription through the NFKB | autoimmune diseases (e.g., rheumatoid arthritis, systemic lupus erythematosis, |
| | | response element that may be used or rountinely modified to test NFKB-response element | multiple sclerosis and/or as described below), and immunodeficiencies (e.g., |
| | | activity of polypeptides of the invention (including antibodies and agonists or antagonists | as described below). An additional highly preferred indication is infection |
| | | of the invention) include assays disclosed in Berger et al., Gene 66: 1-10 (1998); Cullen | (e.g., AIDS, and/or an infectious disease as described below under “Infectious |
| | | and Malm, Methods in Enzymol 216: 362-368 (1992); Henthorn et al., Proc Natl Acad Sci | Disease”). Highly preferred indications include neoplastic diseases (e.g., |
| | | USA 85: 6342-6346 (1988); Valle Blazquez et al, Immunology 90(3): 455-460 (1997); | melanoma, leukemia, lymphoma, and/or as described below under |
| | | Aramburau et al., J Exp Med 82(3): 801-810 (1995); and Fraser et al., 29(3): 838-844 | “Hyperproliferative Disorders”). Highly preferred indications include |
| | | (1999), the contents of each of which are herein incorporated by reference in its entirety. | neoplasms and cancers, such as, for example, melanoma, renal cell carcinoma, |
| | | NK cells that may be used according to these assays are publicly available (e.g., through | leukemia, lymphoma, and prostate, breast, lung, colon, pancreatic, esophageal, |
| | | the ATCC ™). Exemplary human NK cells that may be used according to these assays | stomach, brain, liver and urinary cancer. Other preferred indications include |
| | | include the NKL cell line, which is a human natural killer cell line established from the | benign dysproliferative disorders and pre-neoplastic conditions, such as, for |
| | | peripheral blood of a patient with large granular lymphocytic leukemia. This IL-2 | example, hyperplasia, metaplasia, and/or dysplasia. Preferred indications |
| | | dependent suspension culture cell line has a morphology resembling that of activated NK | also include anemia, pancytopenia, leukopenia, thrombocytopenia, Hodgkin's |
| | | cells. | disease, acute lymphocytic anemia (ALL), plasmacytomas, multiple myeloma, |
| | | | Burkitt's lymphoma, arthritis, AIDS, granulomatous disease, inflammatory |
| | | | bowel disease, sepsis, neutropenia, neutrophilia, psoriasis, hemophilia, |
| | | | hypercoagulation, diabetes mellitus, endocarditis, meningitis, Lyme Disease, |
| | | | suppression of immune reactions to transplanted organs, asthma and allergy. |
| 38 | Activation of transcription | Assays for the activation of transcription through the NFKB response element are well- | Highly preferred indications include inflammation and inflammatory |
| | through NFKB response | known in the art and may be used or routinely modified to assess the ability of | disorders. Highly preferred indications include blood disorders (e.g., as |
| | element in immune cells | polypeptides of the invention (including antibodies and agonists or antagonists of the | described below under “Immune Activity”, “Blood-Related Disorders”, and/or |
| | (such as natural killer cells). | invention) to regulate NFKB transcription factors and modulate expression of | “Cardiovascular Disorders”). Highly preferred indications include |
| | | immunomodulatory genes. Exemplary assays for transcription through the NFKB | autoimmune diseases (e.g., rheumatoid arthritis, systemic lupus erythematosis, |
| | | response element that may be used or rountinely modified to test NFKB-response element | multiple sclerosis and/or as described below), and immunodeficiencies (e.g., |
| | | activity of polypeptides of the invention (including antibodies and agonists or antagonists | as described below). An additional highly preferred indication is infection |
| | | of the invention) include assays disclosed in Berger et al., Gene 66: 1-10 (1998); Cullen | (e.g., AIDS, and/or an insfectious disease as described below under “Infectious |
| | | and Malm, Methods in Enzymol 216: 362-368 (1992); Henthorn et al., Proc Natl Acad Sci | Disease”). Highly preferred indications include neoplastic diseases (e.g., |
| | | USA 85: 6342-6346 (1988); Valle Blazquez et al, Immunology 90(3): 455-460 (1997); | melanoma, leukemia, lymphoma, and/or as described below under |
| | | Aramburau et al., J Exp Med 82(3): 801-810 (1995); and Fraser et al., 29(3): 838-844 | “Hyperproliferative Disorders”). Highly preferred indications include |
| | | (1999), the contents of each of which are herein incorporated by reference in its entirety. | neoplasms and cancers, such as, for example, melanoma, renal cell carcinoma, |
| | | NK cells that may be used according to these assays are publicly available (e.g., through | leukemia, lymphoma, and prostate, breast, lung, colon, pancreatic, esophageal, |
| | | the ATCC ™). Exemplary NK cells that may be used according to these assays include the | stomach, brain, liver and urinary cancer. Other preferred indications include |
| | | NK-YT cell line, which is a human natural killer cell line with cytolytic and cytotoxic | benign dysproliferative disorders and pre-neoplastic conditions, such as, for |
| | | activity. | example, hyperplasia, metaplasia, and/or dysplasia. Preferred indications |
| | | | also include anemia, pancytopenia, leukopenia, thrombocytopenia, Hodgkin's |
| | | | disease, acute lymphocytic anemia (ALL), plasmacytomas, multiple myeloma, |
| | | | Burkitt's lymphoma, arthritis, AIDS, granulomatous disease, inflammatory |
| | | | bowel disease, sepsis, neutropenia, neutrophilia, psoriasis, hemophilia, |
| | | | hypercoagulation, diabetes mellitus, endocarditis, meningitis, Lyme Disease, |
| | | | suppression of immune reactions to transplanted organs, asthma and allergy. |
| 39 | Activation of transcription | Assays for the activation of transcription through the NFKB response element are well- | Highly preferred indications include inflammation and inflammatory |
| | through NFKB response | known in the art and may be used or routinely modified to assess the ability of | disorders. Highly preferred indications include blood disorders (e.g., as |
| | element in immune cells | polypeptides of the invention (including antibodies and agonists or antagonists of the | described below under “Immune Activity”, “Blood-Related Disorders”, and/or |
| | (such as T-cells). | invention) to regulate NFKB transcription factors and modulate expression of | “Cardiovascular Disorders”). Highly preferred indications include |
| | | immunomodulatory genes. Exemplary assays for transcription through the NFKB | autoimmune diseases (e.g., rheumatoid arthritis, systemic lupus erythematosis, |
| | | response element that may be used or rountinely modified to test NFKB-response element | multiple sclerosis and/or as described below), and immunodeficiencies (e.g., |
| | | activity of polypeptides of the invention (including antibodies and agonists or antagonists | as described below). An additional highly preferred indication is infection |
| | | of the invention) include assays disclosed in Berger et al., Gene 66: 1-10 (1998); Cullen | (e.g., AIDS, and/or an infectious disease as described below under “Infectious |
| | | and Malm, Methods in Enzymol 216: 362-368 (1992); Henthorn et al., Proc Natl Acad Sci | Disease”). Highly preferred indications include neoplastic diseases (e.g., |
| | | USA 85: 6342-6346 (1988); Black et al., Virus Gnes 15(2): 105-117 (1997); and Fraser et | melanoma, leukemia, lymphoma, and/or as described below under |
| | | al., 29(3): 838-844 (1999), the contents of each of which are herein incorporated by | “Hyperproliferative Disorders”). Highly preferred indications include |
| | | reference in its entirety. Exemplary human T cells, such as the MOLT4, that may be used | neoplasms and cancers, such as, for example, melanoma, renal cell carcinoma, |
| | | according to these assays are publicly available (e.g., through the ATCC ™). | leukemia, lymphoma, and prostate, breast, lung, colon, pancreatic, esophageal, |
| | | | stomach, brain, liver and urinary cancer. Other preferred indications include |
| | | | benign dysproliferative disorders and pre-neoplastic conditions, such as, for |
| | | | example, hyperplasia, metaplasia, and/or dysplasia. Preferred indications |
| | | | also include anemia, pancytopenia, leukopenia, thrombocytopenia, Hodgkin's |
| | | | disease, acute lymphocytic anemia (ALL), plasmacytomas, multiple myeloma, |
| | | | Burkitt's lymphoma, arthritis, AIDS, granulomatous disease, inflammatory |
| | | | bowel disease, sepsis, neutropenia, neutrophilia, psoriasis, hemophilia, |
| | | | hypercoagulation, diabetes mellitus, endocarditis, meningitis, Lyme Disease, |
| | | | suppression of immune reactions to transplanted organs, asthma and allergy. |
| 40 | Activation of transcription | Assays for the activation of transcription through the NFKB response element are well- | Highly preferred indications include inflammation and inflammatory |
| | through NFKB response | known in the art and may be used or routinely modified to assess the ability of | disorders. Highly preferred indications include blood disorders (e.g., as |
| | element in immune cells | polypeptides of the invention (including antibodies and agonists or antagonists of the | described below under “Immune Activity”, “Blood-Related Disorders”, and/or |
| | (such as T-cells). | invention) to regulate NFKB transcription factors and modulate expression of | “Cardiovascular Disorders”). Highly preferred indications include |
| | | immunomodulatory genes. Exemplary assays for transcription through the NFKB | autoimmune diseases (e.g., rheumatoid arthritis, systemic lupus erythematosis, |
| | | response element that may be used or rountinely modified to test NFKB-response element | multiple sclerosis and/or as described below), and immunodeficiencies (e.g., |
| | | activity of polypeptides of the invention (including antibodies and agonists or antagonists | as described below). An additional highly preferred indication is infection |
| | | of the invention) include assays disclosed in Berger et al., Gene 66: 1-10 (1998); Cullen | (e.g., AIDS, and/or an infectious disease as described below under “Infectious |
| | | and Malm, Methods in Enzymol 216: 362-368 (1992); Henthorn et al., Proc Natl Acad Sci | Disease”). Highly preferred indications include neoplastic diseases (e.g., |
| | | USA 85: 6342-6346 (1988); Black et al., Virus Gnes 15(2): 105-117 (1997); and Fraser et | melanoma, leukemia, lymphoma, and/or as described below under |
| | | al., 29(3): 838-844 (1999), the contents of each of which are herein incorporated by | “Hyperproliferative Disorders”). Highly preferred indications include |
| | | reference in its entirety. T cells that may be used according to these assays are publicly | neoplasms and cancers, such as, melanoma, renal cell carcinoma, leukemia, |
| | | available (e.g., through the ATCC ™). Exemplary human T cells that may be used | lymphoma, and prostate, breast, lung, colon, pancreatic, esophageal, stomach, |
| | | according to these assays include the SUPT cell line, which is a suspension culture of IL-2 | brain, liver and urinary cancer. Other preferred indications include benign |
| | | and IL-4 responsive T cells. | dysproliferative disorders and pre-neoplastic conditions, such as, for example, |
| | | | hyperplasia, metaplasia, and/or dysplasia. Preferred indications also include |
| | | | anemia, pancytopenia, leukopenia, thrombocytopenia, Hodgkin's disease, |
| | | | acute lymphocytic anemia (ALL), plasmacytomas, multiple myeloma, |
| | | | Burkitt's lymphoma, arthritis, AIDS, granulomatous disease, inflammatory |
| | | | bowel disease, sepsis, neutropenia, neutrophilia, psoriasis, hemophilia, |
| | | | hypercoagulation, diabetes mellitus, endocarditis, meningitis, Lyme Disease, |
| | | | suppression of immune reactions to transplanted organs, asthma and allergy. |
| 41 | Activation of transcription | Assays for the activation of transcription through the NFKB response element are well- | Highly preferred indications include inflammation and inflammatory |
| | through NFKB response | known in the art and may be used or routinely modified to assess the ability of | disorders. Highly preferred indications include immunological and |
| | element in immune cells | polypeptides of the invention (including antibodies and agonists or antagonists of the | hematopoietic disorders (e.g., as described below under “Immune Activity”, |
| | (such as the Jurkat human T | invention) to regulate NFKB transcription factors and modulate expression of | “Blood-Related Disorders”, and/or “Cardiovascular Disorders”). Highly |
| | cell line). | immunomodulatory genes. Exemplary assays for transcription through the NFKB | preferred indications include autoimmune diseases (e.g., rheumatoid arthritis, |
| | | response element that may be used or rountinely modified to test NFKB-response element | systemic lupus erythematosis, multiple sclerosis and/or as described below), |
| | | activity of polypeptides of the invention (including antibodies and agonists or antagonists | and immunodeficiencies (e.g., as described below). An additional highly |
| | | of the invention) include assays disclosed in Berger et al., Gene 66: 1-10 (1998); Cullen | preferred indication is infection (e.g., AIDS, and/or an infectious disease as |
| | | and Malm, Methods in Enzymol 216: 362-368 (1992); Henthorn et al., Proc Natl Acad Sci | described below under “Infectious Disease”). Highly preferred indications |
| | | USA 85: 6342-6346 (1988); Valle Blazquez et al, Immunology 90(3): 455-460 (1997); | include neoplastic diseases (e.g., melanoma, leukemia, lymphoma, and/or as |
| | | Aramburau et al., J Exp Med 82(3): 801-810 (1995); and Fraser et al., 29(3): 838-844 | described below under “Hyperproliferative Disorders”). Highly preferred |
| | | (1999), the contents of each of which are herein incorporated by reference in its entirety. T | indications include neoplasms and cancers, such as, melanoma, renal cell |
| | | cells that may be used according to these assays are publicly available (e.g., through the | carcinoma, leukemia, lymphoma, and prostate, breast, lung, colon, pancreatic, |
| | | ATCC ™). T cells that may be used according to these assays are publicly available (e.g., | esophageal, stomach, brain, liver and urinary cancer. Other preferred |
| | | through the ATCC ™). Exemplary human T cells that may be used according to these | indications include benign dysproliferative disorders and pre-neoplastic |
| | | assays include the JURKAT cell line, which is a suspension culture of leukemia cells that | conditions, such as, for example, hyperplasia, metaplasia, and/or dysplasia. |
| | | produce IL-2 when stimulated. | Preferred indications also include anemia, pancytopenia, leukopenia, |
| | | | thrombocytopenia, Hodgkin's disease, acute lymphocytic anemia (ALL), |
| | | | plasmacytomas, multiple myeloma, Burkitt's lymphoma, arthritis, AIDS, |
| | | | granulomatous disease, inflammatory bowel disease, sepsis, neutropenia, |
| | | | neutrophilia, psoriasis, hemophilia, hypercoagulation, diabetes mellitus, |
| | | | endocarditis, meningitis, Lyme Disease, suppression of immune reactions to |
| | | | transplanted organs, asthma and allergy. |
| 42 | Activation of transcription | Assays for the activation of transcription through the Serum Response Element (SRE) are | A preferred embodiment of the invention includes a method for inhibiting |
| | through serum response | well-known in the art and may be used or routinely modified to assess the ability of | (e.g., reducing) TNF alpha production. An alternative highly preferred |
| | element in immune cells | polypeptides of the invention (including antibodies and agonists or antagonists of the | embodiment of the invention includes a method for stimulating (e.g., |
| | (such as natural killer cells). | invention) to regulate serum response factors and modulate the expression of genes | increasing) TNF alpha production. Preferred indications include blood |
| | | involved in growth and upregulate the function of growth-related genes in many cell types. | disorders (e.g., as described below under “Immune Activity”, “Blood-Related |
| | | Exemplary assays for transcription through the SRE that may be used or routinely | Disorders”, and/or “Cardiovascular Disorders”), Highly preferred indications |
| | | modified to test SRE activity of the polypeptides of the invention (including antibodies and | include autoimmune diseases (e.g., rheumatoid arthritis, systemic lupus |
| | | agonists or antagonists of the invention) include assays disclosed in Berger et al., Gene | erythematosis, Crohn''s disease, multiple sclerosis and/or as described below), |
| | | 66: 1-10 (1998); Cullen and Malm, Methods in Enzymol 216: 362-368 (1992); Henthorn et | immunodeficiencies (e.g., as described below), boosting a T cell-mediated |
| | | al., Proc Natl Acad Sci USA 85: 6342-6346 (1988); Benson et al., J Immunol 153(9): 3862-3873 | immune response, and suppressing a T cell-mediated immune response. |
| | | (1994); and Black et al., Virus Genes 12(2): 105-117 (1997), the content of each of | Additional highly preferred indications include inflammation and |
| | | which are herein incorporated by reference in its entirety. T cells that may be used | inflammatory disorders, and treating joint damage in patients with rheumatoid |
| | | according to these assays are publicly available (e.g., through the ATCC ™). Exemplary T | arthritis. An additional highly preferred indication is sepsis. Highly |
| | | cells that may be used according to these assays include the NK-YT cell line, which is a | preferred indications include neoplastic diseases (e.g., leukemia, lymphoma, |
| | | human natural killer cell line with cytolytic and cytotoxic activity. | and/or as described below under “Hyperproliferative Disorders”). |
| | | | Additionally, highly preferred indications include neoplasms and cancers, |
| | | | such as, for example, leukemia, lymphoma, melanoma, glioma (e.g., |
| | | | malignant glioma), solid tumors, and prostate, breast, lung, colon, pancreatic, |
| | | | esophageal, stomach, brain, liver and urinary cancer. Other preferred |
| | | | indications include benign dysproliferative disorders and pre-neoplastic |
| | | | conditions, such as, for example, hyperplasia, metaplasia, and/or dysplasia. |
| | | | Preferred indications include anemia, pancytopenia, leukopenia, |
| | | | thrombocytopenia, Hodgkin's disease, acute lymphocytic anemia (ALL), |
| | | | plasmacytomas, multiple myeloma, Burkitt's lymphoma, arthritis, AIDS, |
| | | | granulomatous disease, inflammatory bowel disease, neutropenia, |
| | | | neutrophilia, psoriasis, suppression of immune reactions to transplanted |
| | | | organs and tissues, hemophilia, hypercoagulation, diabetes mellitus, |
| | | | endocarditis, meningitis, Lyme Disease, cardiac reperfusion injury, and |
| | | | asthma and allergy. An additional preferred indication is infection (e.g., an |
| | | | infectious disease as described below under “Infectious Disease”). |
| 43 | Activation of transcription | Assays for the activation of transcription through the Serum Response Element (SRE) are | A preferred embodiment of the invention includes a method for inhibiting |
| | through serum response | well-known in the art and may be used or routinely modified to assess the ability of | (e.g., reducing) TNF alpha production. An alternative highly preferred |
| | element in immune cells | polypeptides of the invention (including antibodies and agonists or antagonists of the | embodiment of the invention includes a method for stimulating (e.g., |
| | (such as T-cells). | invention) to regulate serum response factors and modulate the expression of genes | increasing) TNF alpha production. Preferred indications include blood |
| | | involved in growth and upregulate the function of growth-related genes in many cell types. | disorders (e.g., as described below under “Immune Activity”, “Blood-Related |
| | | Exemplary assays for transcription through the SRE that may be used or routinely | Disorders”, and/or “Cardiovascular Disorders”), Highly preferred indications |
| | | modified to test SRE activity of the polypeptides of the invention (including antibodies and | include autoimmune diseases (e.g., rheumatoid arthritis, systemic lupus |
| | | agonists or antagonists of the invention) include assays disclosed in Berger et al., Gene | erythematosis, Crohn''s disease, multiple sclerosis and/or as described below), |
| | | 66: 1-10 (1998), Cullen and Malm, Methods in Enzymol 216: 362-368 (1992); Henthorn et | immunodeficiencies (e.g., as described below), boosting a T cell-mediated |
| | | al., Proc Natl Acad Sci USA 85: 6342-6346 (1988); Benson et al., J Immunol 153(9): 3862-3873 | immune response, and suppressing a T cell-mediated immune response. |
| | | (1994); and Black et al., Virus Genes 12(2): 105-117 (1997), the content of each of | Additional highly preferred indications include inflammation and |
| | | which are herein incorporated by reference in its entirety. Human T cells that may be used | inflammatory disorders, and treating joint damage in patients with rheumatoid |
| | | according to these assays are publicly available (e.g., through the ATCC ™). Exemplary | arthritis. An additional highly preferred indication is sepsis. Highly |
| | | human T cells that may be used according to these assays include the JURKAT cell line, | preferred indications include neoplastic diseases (e.g., leukemia, lymphoma, |
| | | which is a suspension culture of leukemia cells that produce IL-2 when stimulated. | and/or as described below under “Hyperproliferative Disorders”). |
| | | | Additionally, highly preferred indications include neoplasms and cancers, |
| | | | such as, leukemia, lymphoma, melanoma, glioma (e.g., malignant glioma), |
| | | | solid tumors, and prostate, breast, lung, colon, pancreatic, esophageal, |
| | | | stomach, brain, liver and urinary cancer. Other preferred indications include |
| | | | benign dysproliferative disorders and pre-neoplastic conditions, such as, for |
| | | | example, hyperplasia, metaplasia, and/or dysplasia. Preferred indications |
| | | | include anemia, pancytopenia, leukopenia, thrombocytopenia, Hodgkin's |
| | | | disease, acute lymphocytic anemia (ALL), plasmacytomas, multiple myeloma, |
| | | | Burkitt's lymphoma, arthritis, AIDS, granulomatous disease, inflammatory |
| | | | bowel disease, neutropenia, neutrophilia, psoriasis, suppression of immune |
| | | | reactions to transplanted organs and tissues, hemophilia, hypercoagulation, |
| | | | diabetes mellitus, endocarditis, meningitis, Lyme Disease, cardiac reperfusion |
| | | | injury, and asthma and allergy. An additional preferred indication is |
| | | | infection (e.g., an infectious disease as described below under “Infectious |
| | | | Disease”). |
| 44 | Activation of transcription | Assays for the activation of transcription through the Serum Response Element (SRE) are | A preferred embodiment of the invention includes a method for inhibiting |
| | through serum response | well-known in the art and may be used or routinely modified to assess the ability of | (e.g., reducing) TNF alpha production. An alternative preferred embodiment |
| | element in immune cells | polypeptides of the invention (including antibodies and agonists or antagonists of the | of the invention includes a method for stimulating (e.g., increasing) TNF |
| | (such as T-cells). | invention) to regulate the serum response factors and modulate the expression of genes | alpha production. Preferred indications include blood disorders (e.g., as |
| | | involved in growth. Exemplary assays for transcription through the SRE that may be used | described below under “Immune Activity”, “Blood-Related Disorders”, and/or |
| | | or routinely modified to test SRE activity of the polypeptides of the invention (including | “Cardiovascular Disorders”), Highly preferred indications include |
| | | antibodies and agonists or antagonists of the invention) include assays disclosed in Berger | autoimmune diseases (e.g., rheumatoid arthritis, systemic lupus erythematosis, |
| | | et al., Gene 66: 1-10 (1998); Cullen and Malm, Methods in Enzymol 216: 362-368 (1992); | Crohn''s disease, multiple sclerosis and/or as described below), |
| | | Henthorn et al., Proc Natl Acad Sci USA 85: 6342-6346 (1988); and Black et al., Virus | immunodeficiencies (e.g., as described below), boosting a T cell-mediated |
| | | Genes 12(2): 105-117 (1997), the content of each of which are herein incorporated by | immune response, and suppressing a T cell-mediated immune response. |
| | | reference in its entirety. T cells that may be used according to these assays are publicly | Additional highly preferred indications include inflammation and |
| | | available (e.g., through the ATCC ™). Exemplary mouse T cells that may be used | inflammatory disorders, and treating joint damage in patients with rheumatoid |
| | | according to these assays include the CTLL cell line, which is an IL-2 dependent | arthritis. An additional highly preferred indication is sepsis. Highly |
| | | suspension culture of T cells with cytotoxic activity. | preferred indications include neoplastic diseases (e.g., leukemia, lymphoma, |
| | | | and/or as described below under “Hyperproliferative Disorders”). |
| | | | Additionally, highly preferred indications include neoplasms and cancers, |
| | | | such as, for example, leukemia, lymphoma, melanoma, glioma (e.g., |
| | | | malignant glioma), solid tumors, and prostate, breast, lung, colon, pancreatic, |
| | | | esophageal, stomach, brain, liver and urinary cancer. Other preferred |
| | | | indications include benign dysproliferative disorders and pre-neoplastic |
| | | | conditions, such as, for example, hyperplasia, metaplasia, and/or dysplasia. |
| | | | Preferred indications include anemia, pancytopenia, leukopenia, |
| | | | thrombocytopenia, Hodgkin's disease, acute lymphocytic anemia (ALL), |
| | | | plasmacytomas, multiple myeloma, Burkitt's lymphoma, arthritis, AIDS, |
| | | | granulomatous disease, inflammatory bowel disease, neutropenia, |
| | | | neutrophilia, psoriasis, suppression of immune reactions to transplanted |
| | | | organs and tissues, hemophilia, hypercoagulation, diabetes mellitus, |
| | | | endocarditis, meningitis, Lyme Disease, cardiac reperfusion injury, and |
| | | | asthma and allergy. An additional preferred indication is infection (e.g., an |
| | | | infectious disease as described below under “Infectious Disease”). |
| 45 | Activation of transcription | Assays for the activation of transcription through the Serum Response Element (SRE) are | A highly preferred indication is obesity and/or complications associated with |
| | through serum response | well-known in the art and may be used or routinely modified to assess the ability of | obesity. Additional highly preferred indications include weight loss or |
| | element in pre-adipocytes. | polypeptides of the invention (including antibodies and agonists or antagonists of the | alternatively, weight gain. An additional highly preferred indication is |
| | | invention) to regulate the serum response factors and modulate the expression of genes | diabetes mellitus. An additional highly preferred indication is a complication |
| | | involved in growth. Exemplary assays for transcription through the SRE that may be used | associated with diabetes (e.g., diabetic retinopathy, diabetic nephropathy, |
| | | or routinely modified to test SRE activity of the polypeptides of the invention (including | kidney disease (e.g., renal failure, nephropathy and/or other diseases and |
| | | antibodies and agonists or antagonists of the invention) include assays disclosed in Berger | disorders as described in the “Renal Disorders” section below), diabetic |
| | | et al., Gene 66: 1-10 (1998); Cullen and Malm, Methods in Enzymol 216: 362-368 (1992); | neuropathy, nerve disease and nerve damage (e.g., due to diabetic |
| | | Henthorn et al., Proc Natl Acad Sci USA 85: 6342-6346 (1988); and Black et al., Virus | neuropathy), blood vessel blockage, heart disease, stroke, impotence (e.g., due |
| | | Genes 12(2): 105-117 (1997), the content of each of which are herein incorporated by | to diabetic neuropathy or blood vessel blockage), seizures, mental confusion, |
| | | reference in its entirety. Pre-adipocytes that may be used according to these assays are | drowsiness, nonketotic hyperglycemic-hyperosmnolar coma, cardiovascular |
| | | publicly available (e.g., through the ATCC ™) and/or may be routinely generated. | disease (e.g., heart disease, atherosclerosis, microvascular disease, |
| | | Exemplary mouse adipocyte cells that may be used according to these assays include 3T3- | hypertension, stroke, and other diseases and disorders as described in the |
| | | L1 cells. 3T3-L1 is an adherent mouse preadipocyte cell line that is a continuous substrain | “Cardiovascular Disorders” section below), dyslipidemnia, endocrine disorders |
| | | of 3T3 fibroblast cells developed through clonal isolation and undergo a pre-adipocyte to | (as described in the “Endocrine Disorders” section below), neuropathy, vision |
| | | adipose-like conversion under appropriate differentiation conditions known in the art. | impairment (e.g., diabetic retinopathy and blindness), ulcers and impaired |
| | | | wound healing, and infection (e.g., infectious diseases and disorders as |
| | | | described in the “Infectious Diseases” section below). Additionial highly |
| | | | preferred indications are complicationis associated with insulin resistance. |
| 46 | Activation of transcription | Assays for the activation of transcription through the Signal Transducers and Activators of | Highly preferred indications include allergy, asthma, and rhinitis. Additional |
| | through STAT6 response | Transcription (STAT6) response element in immune cells (such as in the human HMC-1 | highly preferred indications include infection (e.g., an infectious disease as |
| | element in immune cells | mast cell line) are well-known in the art and may be used or routinely modified to assess | described below under “Infectious Disease”), and inflammation and |
| | (such as mast cells). | the ability of polypeptides of the invention (including antibodies and agonists or | inflammatory disorders. Preferred indications also include hematopoietic and |
| | | antagonists of the invention) to regulate STAT6 transcription factors and modulate the | immunological disorders (e.g., as described below under “Immumie Activity”, |
| | | expression of multiple genes. Exemplary assays for transcription through the STAT6 | “Blood-Related Disorders”, and/or “Cardiovascular Disorders”), autoimmune |
| | | response element that may be used or routinely modified to test STAT6 response element | diseases (e.g., rheumatoid arthritis, systemic lupus erythematosis, multiple |
| | | activity of the polypeptides of the invention (including antibodies and agonists or | sclerosis and/or as described below), and immunodeficiencies (e.g., as |
| | | antagonists of the invention) include assays disclosed in Berger et al., Gene 66: 1-10 | described below). Preferred indicatiomis include neoplastic diseases (e.g., |
| | | (1998); Cullen and Malm, Methods in Enzymol 216: 362-368 (1992); Henthom et al., Proc | leukemia, lymphoma, melanoma, and/or as described below under |
| | | Natl Acad Sci USA 85: 6342-6346 (1988); Sherman, Immunol Rev 179: 48-56 (2001); | “Hyperproliferative Disorders”). Preferred indications include neoplasms and |
| | | Malaviya and Uckun, J Immunol 168: 421-426 (2002); Masuda et al., J Biol Chem | cancer, such as, for example, leukemia, lymphoma, melanoma, and prostate, |
| | | 275(38): 29331-29337 (2000); and Masuda et al., J Biol Chem 276: 26107-26113 (2001), | breast, lung, colon, pancreatic, esophageal, stomach, brain, liver and urinary |
| | | the contents of each of which are herein incorporated by reference in its entirety. Mast | cancer. Other preferred indications include benign dysproliferative disorders |
| | | cells that may be used according to these assays are publicly available (e.g., through the | and pre-neoplastic conditions, such as, for example, hyperplasia, metaplasia, |
| | | ATCC ™). Exemplary human mast cells that may be used according to these assays | and/or dysplasia. Preferred indications include hematopoietic and |
| | | include the HMC-1 cell line, which is an immature human mast cell line established from | immunological disorders such as arthritis, AIDS, granulomatous disease, |
| | | the peripheral blood of a patient with mast cell leukemia, and exhibits many characteristics | inflammatory bowel disease, sepsis, neutropenia, neutrophilia, psoriasis, |
| | | of immature mast cells. | suppression of immune reactions to transplanted organs and tissues, |
| | | | hemophilia, hypercoagulation, diabetes mellitus, endocarditis, meningitis, and |
| | | | Lyme Disease. |
| 47 | Activation of transcription | Assays for the activation of transcription through the Signal Transducers and Activators of | A highly preferred indication is allergy. Another highly preferred |
| | through STAT6 response | Transcription (STAT6) response element are well-known in the art and may be used or | indication is asthma. Additional highly preferred indications include |
| | element in immune cells | routinely modified to assess the ability of polypeptides of the invention (including | inflammation and inflammatory disorders. Preferred indications |
| | (such as T-cells). | antibodies and agonists or antagonists of the invention) to regulate STAT6 transcription | include blood disorders (e.g., as described below under “Immune Activity”, |
| | | factors and modulate the expression of multiple genes. Exemplary assays for transcription | “Blood-Related Disorders”, and/or “Cardiovascular Disorders”). Preferred |
| | | through the STAT6 response element that may be used or routinely modified to test | indications include autoimmune diseases (e.g., rheumatoid arthritis, systemic |
| | | STAT6 response element activity of the polypeptides of the invention (including | lupus erythematosis, multiple sclerosis and/or as described below) and |
| | | antibodies and agonists or antagonists of the invention) include assays disclosed in Berger | immunodeficiencies (e.g., as described below). Preferred |
| | | et al., Gene 66: 1-10 (1998); Cullen and Malm, Methods in Enzymol 216: 362-368 (1992); | indications include neoplastic diseases (e.g., leukemia, lymphoma, melanoma, |
| | | Henthorn et al., Proc Natl Acad Sci USA 85: 6342-6346 (1988); Georas et al., Blood | and/or as described below under “Hyperproliferative Disorders”). Preferred |
| | | 92(12): 4529-4538 (1998); Moffatt et al., Transplantation 69(7): 1521-1523 (2000); Curiel | indications include neoplasms and cancers, such as, leukemia, lymphoma, |
| | | et al., Eur J Immunol 27(8): 1982-1987 (1997); and Masuda et al., J Biol Chem | melanoma, and prostate, breast, lung, colon, pancreatic, esophageal, stomach, |
| | | 275(38): 29331-29337 (2000), the contents of each of which are herein incorporated by | brain, liver and urinary cancer. Other preferred indications include benign |
| | | reference in its entirety. T cells that may be used according to these assays are publicly | dysproliferative disorders and pre-neoplastic conditions, such as, for example, |
| | | available (e.g., through the ATCC ™). Exemplary T cells that may be used according to | hyperplasia, metaplasia, and/or dysplasia. Preferred indications |
| | | these assays include the SUPT cell line, which is a suspension culture of IL-2 and IL-4 | include anemia, pancytopenia, leukopenia, thrombocytopenia, Hodgkin's |
| | | responsive T cells. | disease, acute lymphocytic anemia (ALL), plasmacytomas, multiple myeloma, |
| | | | Burkitt's lymphoma, arthritis, AIDS, granulomatous disease, inflammatory |
| | | | bowel disease, sepsis, neutropenia, neutrophilia, psoriasis, suppression of |
| | | | immune reactions to transplanted organs and tissues, hemophilia, |
| | | | hypercoagulation, diabetes mellitus, endocarditis, meningitis, and Lyme |
| | | | Disease. An additional preferred indication is infection (e.g., an |
| | | | infectious disease as described below under “Infectious Disease”). |
| 48 | Activation or inhibition of | This reporter assay measures activation or inhibition of the NFkB signaling pathway in | |
| | transcription through NFKB | Ku812 human basophil cell line. Assays for the activation or inhibition of transcription | |
| | response element in immune | through the NFKB response element are well-known in the art and may be used or | |
| | cells (such as basophils). | routinely modified to assess the ability of polypeptides of the invention (including | |
| | | antibodies and agonists or antagonists of the invention) to regulate NFKB transcription | |
| | | factors and modulate expression of immunomodulatory genes. NFkB is important in the | |
| | | pathogenesis of asthma. Exemplary assays for transcription through the NFKB response | |
| | | element that may be used or rountinely modified to test NFKB-response element activity | |
| | | of polypeptides of the invention (including antibodies and agonists or antagonists of the | |
| | | invention) include assays disclosed in Berger et al., Gene 66: 1-10 (1998); Cullen and | |
| | | Malm, Methods in Enzymol 216: 362-368 (1992); Henthon et al., Proc Natl Acad Sci USA | |
| | | 85: 6342-6346 (1988); Marone et al, Int Arch Allergy Immunol 114(3): 207-17 (1997), the | |
| | | contents of each of which are herein incorporated by reference in its entirety. Cells were | |
| | | pretreated with SID supernatants or controls for 15-18 hours, and then 10 ng/mL of TNF | |
| | | was added to stimulate the NFkB reporter. SEAP activity was measured after 48 hours. | |
| | | Basophils that may be used according to these assays are publicly available (e.g., through | |
| | | the ATCC ™). Exemplary human basophil cell lines that may be used according to these | |
| | | assays include Ku812, originally established from a patient with chronic myelogenous | |
| | | leukemia. It is an immature prebasophilic cell line that can be induced to differentiate into | |
| | | mature basophils. See, Kishi et al., Leuk Res. 9: 381-390 (1985); Blom et al., Eur J | |
| | | Immunol. 22: 2025-32 (1992), where the contents of each are herein incorporated by | |
| | | reference in its entirety. | |
| 49 | Calcium flux in immune cells | Assays for measuring calcium flux are well-known in the art and may be used or routinely | Preferred embodiments of the invention include using polypeptides of the |
| | (such as monocytes) | modified to assess the ability of polypeptides of the invention (including antibodies and | invention (or antibodies, agonists, or antagonists thereof) in detection, |
| | | agonists or antagonists of the invention) to mobilize calcium. Cells normally have very | diagnosis, prevention, and/or treatment of Infection, Inflammation, |
| | | low concentrations of cytosolic calcium compared to much higher extracellular calcium. | Atherosclerosis, Hypersensitivity, and Leukemias |
| | | Extracellular factors can cause an influx of calcium, leading to activation of calcium | |
| | | responsive signaling pathways and alterations in cell functions. Exemplary assays that | |
| | | may be used or routinely modified to measure calcium flux in immune cells (such as | |
| | | monocytes) include assays disclosed in: Chan, CC, et al., J Pharmacol Exp Ther, | |
| | | 269(3): 891-896 (1994); Andersson, K, et al., Cytokine, 12(12): 1784-1787 (2000); Scully, | |
| | | SP, et al., J Clin Invest, 74(2) 589-599 (1984); and, Sullivan, E, et al., Methods Mol Biol, | |
| | | 114: 125-133 (1999), the contents of each of which is herein incorporated by reference in | |
| | | its entirety. Cells that may be used according to these assays are publicly available (e.g., | |
| | | through the ATCC ™) and/or may be routinely generated. Exemplary cells that may be | |
| | | used according to these assays include the THP-1 monocyte cell line. | |
| 50 | Endothelial Cell Apoptosis | Caspase Apoptosis. Assays for caspase apoptosis are well known in the art and may be | A highly preferred embodiment of the invention includes a method for |
| | | used or routinely modified to assess the ability of polypeptides of the invention (including | stimulating endothelial cell growth. An alternative highly preferred |
| | | antibodies and agonists or antagonists of the invention) to promote caspase protease- | embodiment of the invention includes a method for inhibiting endothelial cell |
| | | mediated apoptosis. Induction of apoptosis in endothelial cells supporting the vasculature | growth. A highly preferred embodiment of the invention includes a method |
| | | of tumors is associated with tumor regression due to loss of tumor blood supply. | for stimulating endothelial cell proliferation. An alternative highly preferred |
| | | Exemplary assays for caspase apoptosis that may be used or routinely modified to test | embodiment of the invention includes a method for inhibiting endothelial cell |
| | | capase apoptosis activity of polypeptides of the invention (including antibodies and | proliferation. A highly preferred embodiment of the invention includes a |
| | | agonists or antagonists of the invention) include the assays disclosed in Lee et al., FEBS | method for stimulating apoptosis of endothelial cells. An alternative highly |
| | | Lett 485(2-3): 122-126 (2000); Nor et al., J Vasc Res 37(3): 209-218 (2000); and Karsan | preferred embodiment of the invention includes a method for inhibiting (e.g., |
| | | and Harlan, J Atheroscler Thromb 3(2): 75-80 (1996); the contents of each of which are | decreasing) apoptosis of endothelial cells. A highly preferred |
| | | herein incorporated by reference in its entirety. Endothelial cells that may be used | embodiment of the invention includes a method for stimulating angiogenisis. |
| | | according to these assays are publicly available (e.g., through commercial sources). | An alternative highly preferred embodiment of the invention includes a |
| | | Exemplary endothelial cells that may be used according to these assays include bovine | method for inhibiting angiogenesis. A highly preferred embodiment of the |
| | | aortic endothelial cells (bAEC), which are an example of endothelial cells which line blood | invention includes a method for reducing cardiac hypertrophy. An alternative |
| | | vessels and are involved in functions that include, but are not limited to, angiogenesis, | highly preferred embodiment of the invention includes a method for inducing |
| | | vascular permeability, vascular tone, and immune cell extravasation. | cardiac hypertrophy. Highly preferred indications include neoplastic |
| | | | diseases (e.g., as described below under “Hyperproliferative Disorders”), and |
| | | | disorders of the cardiovascular system (e.g., heart disease, congestive heart |
| | | | failure, hypertension, aortic stenosis, cardiomyopathy, valvular regurgitation, |
| | | | left ventricular dysfunction, atherosclerosis and atherosclerotic vascular |
| | | | disease, diabetic nephropathy, intracardiac shunt, cardiac hypertrophy, |
| | | | myocardial infarction, chronic hemodynamic overload, and/or as described |
| | | | below under “Cardiovascular Disorders”). Highly preferred indications |
| | | | include cardiovascular, endothelial and/or angiogenic disorders (e.g., |
| | | | systemic disorders that affect vessels such as diabetes mellitus, as well as |
| | | | diseases of the vessels themselves, such as of the arteries, capillaries, veins |
| | | | and/or lymphatics). Highly preferred are indications that stimulate |
| | | | angiogenesis and/or cardiovascularization. Highly preferred are indications |
| | | | that inhibit angiogenesis and/or cardiovascularization. Highly preferred |
| | | | indications include antiangiogenic activity to treat solid tumors, leukemias, |
| | | | and Kaposi''s sarcoma, and retinal disorders. Highly preferred indications |
| | | | include neoplasms and cancer, such as, Kaposi''s sarcoma, hemangioma |
| | | | (capillary and cavernous), glomus tumors, telangiectasia, bacillary |
| | | | angiomatosis, hemangioendothelioma, angiosarcoma, hemangiopericytoma, |
| | | | lymphangioma, lymphangiosarcoma. Highly preferred indications also |
| | | | include cancers such as, prostate, breast, lung, colon, pancreatic, esophageal, |
| | | | stomach, brain, liver, and urinary cancer. Preferred indications include benign |
| | | | dysproliferative disorders and pre-neoplastic conditions, such as, for example, |
| | | | hyperplasia, metaplasia, and/or dysplasia. Highly preferred indications |
| | | | also include arterial disease, such as, atherosclerosis, hypertension, coronary |
| | | | artery disease, inflammatory vasculitides, Reynaud''s disease and Reynaud''s |
| | | | phenomenom, aneurysms, restenosis; venous and lymphatic disorders such as |
| | | | thrombophlebitis, lymphangitis, and lymphedema; and other vascular |
| | | | disorders such as peripheral vascular disease, and cancer. Highly preferred |
| | | | indications also include trauma such as wounds, burns, and injured tissue |
| | | | (e.g., vascular injury such as, injury resulting from balloon angioplasty, and |
| | | | atheroschlerotic lesions), implant fixation, scarring, ischemia reperfusion |
| | | | injury, rheumatoid arthritis, cerebrovascular disease, renal diseases such as |
| | | | acute renal failure, and osteoporosis. Additional highly preferred |
| | | | indications include stroke, graft rejection, diabetic or other retinopathies, |
| | | | thrombotic and coagulative disorders, vascularitis, lymph angiogenesis, sexual |
| | | | disorders, age-related macular degeneration, and treatment/prevention of |
| | | | endometriosis and related conditions. Additional highly preferred indications |
| | | | include fibromas, heart disease, cardiac arrest, heart valve disease, and |
| | | | vascular disease. Preferred indications include blood disorders (e.g., as |
| | | | described below under “Immune Activity”, “Blood-Related Disorders”, and/or |
| | | | “Cardiovascular Disorders”). Preferred indications include autoimmune |
| | | | diseases (e.g., rheumatoid arthritis, systemic lupus erythematosis, multiple |
| | | | sclerosis and/or as described below) and immunodeficiencies (e.g., as |
| | | | described below). Additional preferred indications include inflammation and |
| | | | inflammatory disorders (such as acute and chronic inflammatory diseases, |
| | | | e.g., inflammatory bowel disease and Crohn's disease), and pain management. |
| 51 | Glucose Production in H4IIE | | |
| 52 | Hexosaminidase in RBL-2H3 | | |
| 53 | IFNg in Human T-cell 293T | | |
| 54 | IgG in Human B cells SAC | | |
| 55 | IL-6 in HUVEC | | |
| 56 | Inhibition of adipocyte ERK | Kinase assay: measures the phosphorylation of Elk-1, an indication of activation of | |
| | signaling pathway. | extracellular signal regulated kinase (ERK). ERK pathway regulates cell growth, | |
| | | proliferation and differentiation. Cells were pretreated with SID supernatants for 15-18 | |
| | | hours, and then 100 nM of insulin was added to stimulate ERK kinase. Phosphorylation of | |
| | | Elk-1 was measured after a 20 minute incubation. Pre-adipocytes that may be used | |
| | | according to these assays are publicly available (e.g., through the ATCC ™) and/or may be | |
| | | routinely generated. Exemplary mouse adipocyte cells that may be used according to these | |
| | | assays include 3T3-L1 cells. 3T3-L1 is an adherent mouse preadipocyte cell line that is a | |
| | | continuous substrain of 3T3 fibroblast cells developed through clonal isolation and | |
| | | undergo a pre-adipocyte to adipose-like conversion under appropriate differentiation | |
| | | conditions known in the art. Cells were differentiated to an adipose-like state before being | |
| | | used in the screen. See Green et al., Cell 3: 127-133 (1974), the contents of which are | |
| | | herein incorporated by reference in its entirety. | |
| 57 | Inhibition of squalene | Reporter Assay: construct contains regulatory and coding sequence of squalene synthetase, | |
| | synthetase gene transcription. | the first specific enzyme in the cholesterol biosynthetic pathway. See Jiang, et al., J. Biol. | |
| | | Chem. 268: 12818-128241(993), the contents of which are herein incorporated by reference | |
| | | in its entirety. Cells were treated with SID supernatants, and SEAP activity was measured | |
| | | after 72 hours. HepG2 is a human hepatocellular carcinoma cell line (ATCC ™ HB-8065). | |
| | | See Knowles et al., Science. 209: 497-9 (1980), the contents of which are herein | |
| | | incorporated by reference in its entirety. | |
| 58 | Inhibition of transcription | This reporter assay measures inhibition of the NFkB signaling pathway in Ku812 human | |
| | through NFKB response | basophil cell line. Assays for the inhibition of transcription through the NFKB response | |
| | element in immune cells | element are well-known in the art and may be used or routinely modified to assess the | |
| | (such as basophils). | ability of polypeptides of the invention (including antibodies and agonists or antagonists of | |
| | | the invention) to regulate NFKB transcription factors and modulate expression of | |
| | | immunomodulatory genes. NFkB is important in the pathogenesis of asthma. Exemplary | |
| | | assays for transcription through the NFKB response element that may be used or | |
| | | rountinely modified to test NFKB-response element activity of polypeptides of the | |
| | | invention (including antibodies and agonists or antagonists of the invention) include assays | |
| | | disclosed in Berger et al., Gene 66: 1-10 (1998); Cullen and Malm, Methods in Enzymol | |
| | | 216: 362-368 (1992); Henthorn et al., Proc Natl Acad Sci USA 85: 6342-6346 (1988); | |
| | | Marone et al, Int Arch Allergy Immunol 114(3): 207-17 (1997), the contents of each of | |
| | | which are herein incorporated by reference in its entirety. Cells were pretreated with SID | |
| | | supernatants or controls for 15-18 hours, and then 10 ng/mL of TNF was added to | |
| | | stimulate the NFkB reporter. SEAP activity was measured after 48 hours. Exemplary | |
| | | human basophil cell lines that may be used according to these assays such as Ku812, is | |
| | | obtainable from the ATCC ™ as CRL-2099. Ku812 was originally established from a | |
| | | patient with chronic myelogenous leukemia. It is an immature prebasophilic cell line that | |
| | | can be induced to differentiate into mature basophils. See, Kishi et al., Leuk Res. 9: 381-390 | |
| | | (1985); Blom et al., Eur J Immunol. 22: 2025-32 (1992), where the contents of each are | |
| | | herein incorporated by reference in its entirety. | |
| 59 | Insulin Secretion | Assays for measuring secretion of insulin are well-known in the art and may be used or | A highly preferred indication is diabetes mellitus. An additional highly |
| | | routinely modified to assess the ability of polypeptides of the invention (including | preferred indication is a complication associated with diabetes (e.g., diabetic |
| | | antibodies and agonists or antagonists of the invention) to stimulate insulin secretion. For | retinopathy, diabetic nephropathy, kidney disease (e.g., renal failure, |
| | | example, insulin secretion is measured by FMAT using anti-rat insulin antibodies. Insulin | nephropathy and/or other diseases and disorders as described in the “Renal |
| | | secretion from pancreatic beta cells is upregulated by glucose and also by certain | Disorders” section below), diabetic neuropathy, nerve disease and nerve |
| | | proteins/peptides, and disregulation is a key component in diabetes. Exemplary assays that | damage (e.g., due to diabetic neuropathy), blood vessel blockage, heart |
| | | may be used or routinely modified to test for stimulation of insulin secretion (from | disease, stroke, impotence (e.g., due to diabetic neuropathy or blood vessel |
| | | pancreatic cells) by polypeptides of the invention (including antibodies and agonists or | blockage), seizures, mental confusion, drowsiness, nonketotic hyperglycemic- |
| | | antagonists of the invention) include assays disclosed in: Shimizu, H., et al., Endocr J, | hyperosmolar coma, cardiovascular disease (e.g., heart disease, |
| | | 47(3): 261-9 (2000); Salapatek, A. M., et al., Mol Endocrinol, 13(8): 1305-17 (1999); | atherosclerosis, microvascular disease, hypertension, stroke, and other |
| | | Filipsson, K., et al., Ann N Y Acad Sci, 865: 441-4 (1998); Olson, L. K., et al., J Biol | diseases and disorders as described in the “Cardiovascular Disorders” section |
| | | Chem, 271(28): 16544-52 (1996); and, Miraglia S et. al., Journal of Biomolecular | below), dyslipidemia, endocrine disorders (as described in the “Endocrine |
| | | Screening, 4: 193-204 (1999), the contents of each of which is herein incorporated by | Disorders” section below), neuropathy, vision impairment (e.g., diabetic |
| | | reference in its entirety. Pancreatic cells that may be used according to these assays are | retinopathy and blindness), ulcers and impaired wound healing, and infection |
| | | publicly available (e.g., through the ATCC ™) and/or may be routinely generated. | (e.g., infectious diseases and disorders as described in the “Infectious |
| | | Exemplary pancreatic cells that may be used according to these assays include HITT15 | Diseases” section below, especially of the urinary tract and skin), carpal tunnel |
| | | Cells. HITT15 are an adherent epithelial cell line established from Syrian hamster islet | syndrome and Dupuytren's contracture). An additional highly preferred |
| | | cells transformed with SV40. These cells express glucagon, somatostatin, and | indication is obesity and/or complications associated with obesity. Additional |
| | | glucocorticoid receptors. The cells secrete insulin, which is stimulated by glucose and | highly preferred indications include weight loss or alternatively, weight gain. |
| | | glucagon and suppressed by somatostatin or glucocorticoids. ATTC# CRL-1777 Refs: | Additional highly preferred indications are complications associated with |
| | | Lord and Ashcroft. Biochem. J. 219: 547-551; Santerre et al. Proc. Natl. Acad. Sci. USA | insulin resistance. |
| | | 78: 4339-4343, 1981. | |
| 60 | Myoblast cell proliferation | Assays for muscle cell proliferation are well known in the art and may be used or routinely | Highly preferred indications include diabetes, myopathy, muscle cell atrophy, |
| | | modified to assess the ability of polypeptides of the invention (including antibodies and | cancers of muscle (such as, rhabdomyoma, and rhabdosarcoma), |
| | | agonists or antagonists of the invention) to stimulate or inhibit myoblast cell proliferation, | cardiovascular disorders (such as congestive heart failure, cachexia, myxomas, |
| | | Exemplary assays for myoblast cell proliferation that may be used or routinely modified to | fibromas, congenital cardiovascular abnormalities, heart disease, cardiac |
| | | test activity of polypeptides and antibodies of the invention (including agonists or | arrest, heart valve disease, vascular disease, and also as described below under |
| | | antagonists of the invention) include, for example, assays disclosed in: Soeta, C., et al. | “Cardiovascular Disorders”), stimulating myoblast proliferation, and |
| | | “Possible role for the c-ski gene in the proliferation of myogenic cells in regenerating | inhibiting myoblast proliferation. |
| | | skeletal muscles of rats” Dev Growth Differ Apr; 43(2): 155-64 (2001); Ewton DZ, et al., | |
| | | “IGF binding proteins-4, -5 and -6 may play specialized roles during L6 myoblast | |
| | | proliferation and differentiation” J Endocrinol Mar; 144(3): 539-53 (1995); and, Pampusch | |
| | | MS, et al., “Effect of transforming growth factor beta on proliferation of L6 and embryonic | |
| | | porcine myogenic cells” J Cell Physiol Jun; 143(3): 524-8 (1990); the contents of each of | |
| | | which are herein incorporated by reference in their entirety. Exemplary myoblast cells that | |
| | | may be used according to these assays include the rat myoblast L6 cell line. Rat myoblast | |
| | | L6 cells are an adherent rat myoblast cell line, isolated from primary cultures of rat thigh | |
| | | muscle, that fuse to form multinucleated myotubes and striated fibers after culture in | |
| | | differentiation media. | |
| 61 | Production of ICAM in | Endothelial cells, which are cells that line blood vessels, and are involved in functions that | Highly preferred indications include inflammation (acute and chronic), |
| | endothelial cells (such as | include, but are not limited to, angiogenesis, vascular permeability, vascular tone, and | restnosis, atherosclerosis, asthma and allergy. Highly preferred indications |
| | human umbilical vein | immune cell extravasation. Exemplary endothelial cells that may be used in ICAM | include inflammation and inflammatory disorders, immunological disorders, |
| | endothelial cells (HUVEC)) | production assays include human umbilical vein endothelial cells (HUVEC), and are | neoplastic disorders (e.g. cancer/tumorigenesis), and cardiovascular disorders |
| | | available from commercial sources. The expression of ICAM (CD54),a intergral | (such as described below under “Immune Activity”, “Blood-Related |
| | | membrane protein, can be upregulated by cytokines or other factors, and ICAM expression | Disorders”, “Hyperproliferative Disorders” and/or “Cardiovascular |
| | | is important in mediating immune and endothelial cell interactions leading to immune and | Disorders”). Highly preferred indications include neoplasms and cancers such |
| | | inflammatory responses. Assays for measuring expression of ICAM-1 are well-known in | as, for example, leukemia, lymphoma, melanoma, renal cell carcinoma, and |
| | | the art and may be used or routinely modified to assess the ability of polypeptides of the | prostate, breast, lung, colon, pancreatic, esophageal, stomach, brain, liver and |
| | | invention (including antibodies and agonists or antagonists of the invention) to regulate | urinary cancer. Other preferred indications include benign dysproliferative |
| | | ICAM-1 expression. Exemplary assays that may be used or routinely modified to measure | disorders and pre-neoplastic conditions, such as, for example, hyperplasia, |
| | | ICAM-1 expression include assays disclosed in: Rolfe BE, et al., Atherosclerosis, | metaplasia, and/or dysplasia. |
| | | 149(1): 99-110 (2000); Panettieri RA Jr, et al., J Immunol, 154(5): 2358-2365 (1995); and, | |
| | | Grunstein MM, et al., Am J Physiol Lung Cell Mol Physiol, 278(6): L1154-L1163 (2000), | |
| | | the contents of each of which is herein incorporated by reference in its entirety. | |
| 62 | Production of ICAM-1 | Assays for measuring expression of ICAM-1 are well-known in the art and may be used or | Preferred embodiments of the invention include using polypeptides of the |
| | | routinely modified to assess the ability of polypeptides of the invention (including | invention (or antibodies, agonists, or antagonists thereof) in detection, |
| | | antibodies and agonists or antagonists of the invention) to regulate ICAM-1 expression. | diagnosis, prevention, and/or treatment of Inflammation, Vascular Disease, |
| | | Exemplary assays that may be used or routinely modified to measure ICAM-1 expression | Athereoselerosis, Restenosis, and Stroke |
| | | include assays disclosed in: Takacs P, et al, FASEB J, 15(2): 279-281 (2001); and, | |
| | | Miyamoto K, et al., Am J Pathol, 156(5): 1733-1739 (2000), the contents of each of which | |
| | | is herein incorporated by reference in its entirety. Cells that may be used according to | |
| | | these assays are publicly available (e.g., through the ATCC ™) and/or may be routinely | |
| | | generated. Exemplary cells that may be used according to these assays include | |
| | | microvascular endothelial cells (MVEC). | |
| 63 | Production of IFNgamma | IFNgamma FMAT. IFNg plays a central role in the immune system and is considered to be | A highly preferred embodiment of the invention includes a method for |
| | using a T cells | a proinflammatory cytokine. IFNg promotes TH1 and inhibits TH2 differentiation; | stimulating the production of IFNg. An alternative highly preferred |
| | | promotes IgG2a and inhibits IgE secretion; induces macrophage activation; and increases | embodiment of the invention includes a method for inhibiting the production |
| | | MHC expression. Assays for immunomodulatory proteins produced by T cells and NK | of IFNg. Highly preferred indications include blood disorders (e.g., as |
| | | cells that regulate a variety of inflammatory activities and inhibit TH2 helper cell functions | described below under “Immune Activity”, “Blood-Related Disorders”, and/or |
| | | are well known in the art and may be used or routinely modified to assess the ability of | “Cardiovascular Disorders”), and infection (e.g., viral infections, tuberculosis, |
| | | polypeptides of the invention (including antibodies and agonists or antagonists of the | infections associated with chronic granulomatosus disease and malignant |
| | | invention) to mediate immunomodulation, regulate inflammatory activities, modulate TH2 | osteoporosis, and/or as described below under “Infectious Disease”). Highly |
| | | helper cell function, and/or mediate humoral or cell-mediated immunity. Exemplary | preferred indications include autoimmune disease (e.g., rheumatoid arthritis, |
| | | assays that test for immunomodulatory proteins evaluate the production of cytokines, such | systemic lupus erythematosis, multiple sclerosis and/or as described below), |
| | | as Interferon gamma (IFNg), and the activation of T cells. Such assays that may be used | immunodeficiency (e.g., as described below), boosting a T cell-mediated |
| | | or routinely modified to test immunomodulatory activity of polypeptides of the invention | immune response, and suppressing a T cell-mediated immune response. |
| | | (including antibodies and agonists or antagonists of the invention) include the assays | Additional highly preferred indications include inflammation and |
| | | disclosed in Miraglia et al., J Biomolecular Screening 4: 193-204 (1999); Rowland et al., | inflammatory disorders. Additional preferred indications include idiopathic |
| | | “Lymphocytes: a practical approach” Chapter 6: 138-160 (2000); Gonzalez et al., J Clin | pulmonary fibrosis. Highly preferred indications include neoplastic diseases |
| | | Lab Anal 8(5): 225-233 (1995); Billiau et al., Ann NY Acad Sci 856: 22-32 (1998); Boehm | (e.g., leukemia, lymphoma, melanoma, and/or as described below under |
| | | et al., Annu Rev Immunol 15: 749-795 (1997), and Rheumatology (Oxford) 38(3): 214-20 | “Hyperproliferative Disorders”). Highly preferred indications include |
| | | (1999), the contents of each of which are herein incorporated by reference in its entirety. | neoplasnis and cancers, such as, for example, leukemia, lymphoma, |
| | | Human T cells that may be used according to these assays may be isolated using | melanoma, and prostate, breast, lung, colon, pancreatic, esophageal, stomach, |
| | | techniques disclosed herein or otherwise known in the art. Human T cells are primary | brain, liver and urinary cancer. Other preferred indications include benign |
| | | human lymphocytes that mature in the thymus and express a T Cell receptor and CD3, | dysproliferative disorders and pre-neoplastic conditions, such as, for example, |
| | | CD4, or CD8. These cells mediate humoral or cell-mediated immunity and may be | hyperplasia, metaplasia, and/or dysplasia. Preferred indications include |
| | | preactivated to enhance responsiveness to immunomodulatory factors. | anemia, pancytopenia, leukopenia, thrombocytopenia, Hodgkin's disease, |
| | | | acute lymphocytic anemia (ALL), plasmacytomas, multiple myeloma, |
| | | | Burkitt's lymphoma, arthritis, AIDS, granulomatous disease, inflammatory |
| | | | bowel disease, sepsis, neutropenia, neutrophilia, psoriasis, suppression of |
| | | | immune reactions to transplanted organs and tissues, hemophilia, |
| | | | hypercoagulation, diabetes mellitus, endocarditis, meningitis, Lyme Disease, |
| | | | asthma and allergy. |
| 64 | Production of IL-10 and | Assays for production of IL-10 and activation of T-cells are well known in the art and may | Highly preferred indications include allergy and asthma. Additional highly |
| | activation of T-cells. | be used or routinely modified to assess the ability of polypeptides of the invention | preferred indications include immune and hematopoietic disorders (e.g., as |
| | | (including antibodies and agonists or antagonists of the invention) to stimulate or inhibit | described below under “Immune Activity”, and “Blood-Related Disorders”), |
| | | production of IL-10 and/or activation of T-cells. Exemplary assays that may be used or | autoimmune diseases (e.g., rheumatoid arthritis, systemic lupus erythematosis, |
| | | routinely modified to assess the ability of polypeptides and antibodies of the invention | Crohn''s disease, multiple sclerosis and/or as described below), |
| | | (including agonists or antagonists of the invention) to modulate IL-10 production and/or T- | immunodeficiencies (e.g., as described below), boosting a T cell-mediated |
| | | cell proliferation include, for example, assays such as disclosed and/or cited in: Robinson, | immune response, and suppressing a T cell-mediated immune response. |
| | | DS, et al., “Th-2 cytokines in allergic disease” Br Med Bull; 56 (4): 956-968 (2000), and | |
| | | Cohn, et al., “T-helper type 2 cell-directed therapy for asthma” Pharmacology & | |
| | | Therapeutics; 88: 187-196 (2000); the contents of each of which are herein incorporated by | |
| | | reference in their entirety. Exemplary cells that may be used according to these assays | |
| | | include Th2 cells. IL10 secreted from Th2 cells may be measured as a marker of Th2 cell | |
| | | activation. Th2 cells are a class of T cells that secrete IL4, IL10, IL13, IL5 and IL6. | |
| | | Factors that induce differentiation and activation of Th2 cells play a major role in the | |
| | | initiation and pathogenesis of allergy and asthma. Primary T helper 2 cells are generated | |
| | | via in vitro culture under Th2 polarizing conditions using peripheral blood lymphocytes | |
| | | isolated from cord blood. | |
| 65 | Production of IL-13 and | Assays for production of IL-13 and activation of T-cells are well known in the art and may | Highly preferred indications include allergy and asthma. Additional highly |
| | activation of T-cells. | be used or routinely modified to assess the ability of polypeptides of the invention | preferred indications include immune and hematopoietic disorders (e.g., as |
| | | (including antibodies and agonists or antagonists of the invention) to stimulate or inhibit | described below under “Immune Activity”, and “Blood-Related Disorders”), |
| | | production of IL-13 and/or activation of T-cells. Exemplary assays for IL-13 production | autoimmune diseases (e.g., rheumatoid arthritis, systemic lupus erythematosis, |
| | | that may be used or routinely modified to test activity of polypeptides and antibodies of the | Crohn''s disease, multiple sclerosis and/or as described below), |
| | | invention (including agonists or antagonists of the invention) include, for example, assays | immunodeficiencies (e.g., as described below), boosting a T cell-mediated |
| | | such as disclosed and/or cited in: Grunig, G, et al., “Requirement for IL-13 independently | immune response, and suppressing a T cell-mediated immune response. |
| | | of IL-4 in Experimental asthma” Science; 282: 2261-2263 (1998), and Wills-Karp M, et al., | |
| | | “Interleukin-13: central mediator of allergic asthma” Science; 282: 2258-2261 (1998); the | |
| | | contents of each of which are herein incorporated by reference in their entirety. | |
| | | Exemplary cells that may be used according to these assays include Th2 cells. IL13, a Th2 | |
| | | type cytokine, is a potent stimulus for mucus production, airway hyper-responsiveness | |
| | | and allergic asthma. Th2 cells are a class of T cells that secrete IL4, IL10, IL13, IL5 and | |
| | | IL6. Factors that induce differentiation and activation of Th2 cells play a major role in | |
| | | the initiation and pathogenesis of allergy and asthma. Primary T helper 2 cells are | |
| | | generated in in vitro culture under Th2 polarizing conditions using peripheral blood | |
| | | lymphocytes isolated from cord blood. | |
| 66 | Production of IL-4 | IL-4 FMAT. Assays for immunomodulatory proteins secreted by TH2 cells that stimulate | A highly preferred embodiment of the invention includes a method for |
| | | B cells, T cells, macrophages and mast cells and promote polarization of CD4+ cells into | stimulating (e.g., increasing) IL-4 production. An alternative highly preferred |
| | | TH2 cells are well known in the art and may be used or routinely modified to assess the | embodiment of the invention includes a method for inhibiting (e.g., reducing) |
| | | ability of polypeptides of the invention (including antibodies and agonists or antagonists of | IL-4 production. A highly preferred indication includes asthma. A |
| | | the invention) to mediate immunomodulation, stimulate immune cells, modulate immune | highly preferred indication includes allergy. A highly preferred indication |
| | | cell polarization, and/or mediate humoral or cell-mediated immunity. Exemplary assays | includes rhinitis. Additional highly preferred indications include |
| | | that test for immunomodulatory proteins evaluate the production of cytokines, such as IL- | inflammation and inflammatory disorders. Highly preferred indications |
| | | 4, and the stimulation of immune cells, such as B cells, T cells, macrophages and mast | include neoplastic diseases (e.g., leukemia, lymphoma, melanoma, and/or as |
| | | cells. Such assays that may be used or routinely modified to test immunomodulatory | described below under “Hyperproliferative Disorders”). Preferred indications |
| | | activity of polypeptides of the invention (including antibodies and agonists or antagonists | include neoplasms and cancers, such as, for example, leukemia, lymphoma, |
| | | of the invention) include the assays disclosed in Miraglia et al., J Biomolecular Screening | melanoma, and prostate, breast, lung, colon, pancreatic, esophageal, stomach, |
| | | 4: 193-204 (1999); Rowland et al., “Lymphocytes: a practical approach” Chapter 6: 138-160 | brain, liver and urinary cancer. Other preferred indications include benign |
| | | (2000); Gonzalez et al., J Clin Lab Anal 8(5): 277-283 (1194); Yssel et al., Res Immunol | dysproliferative disorders and pre-neoplastic conditions, such as, for example, |
| | | 144(8): 610-616 (1993); Bagley et al., Nat Immunol 1(3): 257-261 (2000); and van der | hyperplasia, metaplasia, and/or dysplasia. Preferred indications include |
| | | Graaff et al., Rheumatology (Oxford) 38(3): 214-220 (1999), the contents of each of which | blood disorders (e.g., as described below under “Immune Activity”, “Blood- |
| | | are herein incorporated by reference in its entirety. Human T cells that may be used | Related Disorders”, and/or “Cardiovascular Disorders”). Preferred indications |
| | | according to these assays may be isolated using techniques disclosed herein or otherwise | include autoimmune diseases (e.g., rheumatoid arthritis, systemic lupus |
| | | known in the art. Human T cells are primary human lymphocytes that mature in the | erythematosis, multiple sclerosis and/or as described below) and |
| | | thymus and express a T cell receptor and CD3, CD4, or CD8. These cells mediate | immunodeficiencies (e.g., as described below). Preferred indications |
| | | humoral or cell-mediated immunity and may be preactivated to enhance responsiveness to | include anemia, pancytopenia, leukopenia, thrombocytopenia, Hodgkin's |
| | | immunomodulatory factors. | disease, acute lymphocytic anemia (ALL), plasmacytomas, multiple myeloma, |
| | | | Burkitt's lymphoma, arthritis, AIDS, granulomatous disease, inflammatory |
| | | | bowel disease, sepsis, neutropenia, neutrophilia, psoriasis, suppression of |
| | | | immune reactions to transplanted organs and tissues, hemophilia, |
| | | | hypercoagulation, diabetes mellitus, endocarditis, meningitis, and Lyme |
| | | | Disease. An additonal preferred indication is infection (e.g., an infectious |
| | | | disease as described below under “Infectious Disease”). |
| 67 | Production of IL-5 | IL-5 FMAT. Assays for immunomodulatory proteins secreted by TH2 cells, mast cells, | A highly preferred embodiment of the invention includes a method for |
| | | basophils, and eosinophils that stimulate eosinophil function and B cell Ig production and | inhibiting (e.g., reducing) IL-5 production. An alternative highly preferred |
| | | promote polarization of CD4+ cells into TH2 cells are well known in the art and may be | embodiment of the invention includes a method for stimulating (e.g., |
| | | used or routinely modified to assess the ability of polypeptides of the invention (including | increasing) IL-5 production. A highly preferred embodiment of the |
| | | antibodies and agonists or antagonists of the invention) to mediate immunomodulation, | invention includes a method for stimulating (e.g., increasing) immunoglobulin |
| | | stimulate immune cell function, modulate B cell Ig production, modulate immune cell | production. An alternative highly preferred embodiment of the invention |
| | | polarization, and/or mediate humoral or cell-mediated immunity. Exemplary assays that | includes a method for inhibiting (e.g., decreasing) immunoglobulin |
| | | test for immunomodulatory proteins evaluate the production of cytokines, such as IL-5, | production. A highly preferred indication includes allergy. A highly |
| | | and the stimulation of eosinophil function and B cell Ig production. Such assays that may | preferred inidication includes asthma. A highly preferred indication |
| | | be used or routinely modified to test immunomodulatory activity of polypeptides of the | includes rhinitis. An additional highly preferred indication is infection |
| | | invention (including antibodies and agonists or antagonists of the invention) include the | (e.g., an infectious disease as described below under “Infectious Disease”), |
| | | assays disclosed in Miraglia et al., J Biomolecular Screening 4: 193-204 (1999); Rowland | and inflammation and inflammatory disorders. Preferred inidications |
| | | et al., “Lymphocytes: a practical approach” Chapter 6: 138-160 (2000); Ohshima et al., | include blood disorders (e.g., as described below under “Immune Activity”, |
| | | Blood 92(9): 3338-3345 (1998); Jung et al., Eur J Immunol 25(8): 2413-2416 (1995); Mori | “Blood-Related Disorders”, and/or “Cardiovascular Disorders”). Preferred |
| | | et al., J Allergy Clin Immunol 106(1 Pt 2): 558-564 (2000); and Koning et al., Cytokine | indications include autoimmune diseases (e.g., rheumatoid arthritis, systemic |
| | | 9(6): 427-436 (1997), the contents of each of which are herein incorporated by reference in | lupus erythematosis, multiple sclerosis and/or as described below) and |
| | | its entirety. Human T cells that may be used according to these assays may be isolated | immunodeficiencies (e.g., as described below). Preferred indications |
| | | using techniques disclosed herein or otherwise known in the art. Human T cells are | include neoplastic diseases (e.g., leukemia, lymphoma, melanoma, and/or as |
| | | primary human lymphocytes that mature in the thymus and express a T cell receptor and | described below under “Hyperproliferative Disorders”). Preferred indications |
| | | CD3, CD4, or CD8. These cells mediate humoral or cell-mediated immunity and may be | include neoplasms and cancers, such as, leukemia, lymphoma, melanoma, and |
| | | preactivated to enhance responsiveness to immunomodulatory factors. | prostate, breast, lung, colon, pancreatic, esophageal, stomach, brain, liver and |
| | | | urinary cancer. Other preferred indications include benign dysproliferative |
| | | | disorders and pre-neoplastic conditions, such as, for example, hyperplasia, |
| | | | metaplasia, and/or dysplasia. Preferred indications include anemia, |
| | | | pancytopenia, leukopenia, thrombocytopenia, leukemias, Hodgkin's disease, |
| | | | acute lymphocytic anemia (ALL), plasmacytomas, multiple myeloma, |
| | | | Burkitt's lymphoma, arthritis, AIDS, granulomatous disease, inflammatory |
| | | | bowel disease, sepsis, neutropenia, neutrophilia, psoriasis, immune reactions |
| | | | to transplanted organs and tissues, hemophilia, hypercoagulation, diabetes |
| | | | mellitus, endocarditis, meningitis, and Lyme Disease. |
| 68 | Production of IL-6 | IL-6 FMAT. IL-6 is produced by T cells and has strong effects on B cells. IL-6 | A highly preferred embodiment of the invention includes a method for |
| | | participates in IL-4 induced IgE production and increases IgA production (IgA plays a role | stimulating (e.g., increasing) IL-6 production. An alternative highly preferred |
| | | in mucosal immunity). IL-6 induces cytotoxic T cells. Deregulated expression of IL-6 has | embodiment of the invention includes a method for inhibiting (e.g., reducing) |
| | | been linked to autoimmune disease, plasmacytomas, myelomas, and chronic | IL-6 production. A highly preferrred indication is the stimulation or |
| | | hyperproliferative diseases. Assays for immunomodulatory and differentiation factor | enhancement of mucosal immunity. Highly preferred indications include |
| | | proteins produced by a large variety of cells where the expression level is strongly | blood disorders (e.g., as described below under “Immune Activity”, “Blood- |
| | | regulated by cytokines, growth factors, and hormones are well known in the art and may | Related Disorders”, and/or “Cardiovascular Disorders”), and infection (e.g., as |
| | | be used or routinely modified to assess the ability of polypeptides of the invention | described below under “Infectious Disease”). Highly preferred indications |
| | | (including antibodies and agonists or antagonists of the invention) to mediate | include autoimmune diseases (e.g., rheumatoid arthritis, systemic lupus |
| | | immunomodulation and differentiation and modulate T cell proliferation and function. | erythematosis, multiple sclerosis and/or as described below) and |
| | | Exemplary assays that test for immunomodulatory proteins evaluate the production of | immunodeficiencies (e.g., as described below). Highly preferred indications |
| | | cytokines, such as IL-6, and the stimulation and upregulation of T cell proliferation and | also include boosting a B cell-mediated immune response and alternatively |
| | | functional activities. Such assays that may be used or routinely modified to test | suppressing a B cell-mediated immune response. Highly preferred indications |
| | | immunomodulatory and diffferentiation activity of polypeptides of the invention | include inflammation and inflammatory disorders. Additional highly preferred |
| | | (including antibodies and agonists or antagonists of the invention) include assays disclosed | indications include asthma and allergy. Highly preferred indications include |
| | | in Miraglia et al., J Biomolecular Screening 4: 193-204(1999); Rowland et al., | neoplastic diseases (e.g., myeloma, plasmacytoma, leukemia, lymphoma, |
| | | “Lymphocytes: a practical approach” Chapter 6: 138-160(2000); and Verhasselt et al., J | melanoma, and/or as described below under “Hyperproliferative Disorders”). |
| | | Immunol 158: 2919-2925 (1997), the contents of each of which are herein incorporated by | Highly preferred indications include neoplasms and cancers, such as, |
| | | reference in its entirety. Human dendritic cells that may be used according to these assays | myeloma, plasmacytoma, leukemia, lymphoma, melanoma, and prostate, |
| | | may be isolated using techniques disclosed herein or otherwise known in the art. Human | breast, lung, colon, pancreatic, esophageal, stomach, brain, liver and urinary |
| | | dendritic cells are antigen presenting cells in suspension culture, which, when activated by | cancer. Other preferred indications include benign dysproliferative disorders |
| | | antigen and/or cytokines, initiate and upregulate T cell proliferation and functional | and pre-neoplastic conditions, such as, for example, hyperplasia, metaplasia, |
| | | activities. | and/or dysplasia. Preferred indications include anemia, pancytopenia, |
| | | | leukopenia, thrombocytopenia, Hodgkin's disease, acute lymphocytic anemia |
| | | | (ALL), multiple myeloma, Burkitt's lymphoma, arthritis, AIDS, |
| | | | granulomatous disease, inflammatory bowel disease, sepsis, neutropenia, |
| | | | neutrophilia, psoriasis, suppression of immune reactions to transplanted |
| | | | organs and tissues, hemophilia, hypercoagulation, diabetes mellitus, |
| | | | endocarditis, meningitis, and Lyme Disease. An additonal preferred |
| | | | indication is infection (e.g., an infectious disease as described below under |
| | | | “Infectious Disease”). |
| 69 | Production of IL-8 by by | Assays measuring production of IL-8 are well known in the art and may be used or | Highly preferred indications include immunological and inflammatory |
| | endothelial cells (such as | routinely modified to assess the ability of polypeptides of the invention (including | disorders (e.g., such as allergy, asthma, leukemia, etc. and as described below |
| | Human Umbilical Cord | antibodies and agonists or antagonists of the invention) to regulate production and/or | under “Immune Activity”, and “Blood-Related Disorders”). Highly preferred |
| | Endothelial Cells). | secretion of IL-8. For example, FMAT may be used or routinely modified to assess the | indications also includie autoimmune disorders (e.g., rheumatoid arthritis, |
| | | ability of polypeptides of the invention (including antibodies and agonists or antagonists of | systemic lupus erythematosis, Crohn''s disease, multiple sclerosis and/or as |
| | | the invention) to regulate production and/or secretion of IL-8 from endothelial cells (such | described below), neoplastic disorders (e.g., organ cancers such as lung, liver, |
| | | as human umbilical vein endothelial cells (HUVEC)). HUVECs are endothelial cells | colon cancer, and/or as described below under “Hyperproliferative |
| | | which line venous blood vessels, and are involved in functions that include, but are not | Disorders”), and cardiovascular disorders (e.g. such as described below under |
| | | limited to, angiogenesis, vascular permeability, vascular tone, and immune cell | “Cardiovascular Disorders”). Preferred indications include thrombosis, |
| | | extravasation. Endothelial cells play a pivotal role in the initiation and perpetuation of | bacteremia and sepsis syndrome and consequent complications (such as acute |
| | | inflammation and secretion of IL-8 may play an important role in recruitment and | respiratory distress syndrome and systemic ischemia-reperfusion resulting |
| | | activation of immune cells such as neutrophils, macrophages, and lymphocytes. | from septic shock), restnosis and atherosclerosis. |
| 70 | Production of IL-8 by | Assay that measures the production of the chemokine interleukin-8 (IL-8) from immune | Highly preferred indications include eosinophilia, asthma, allergy, |
| | immune cells (such as the | cells (such as the EOL-1 human eosinophil cell line) are well known in the art (for | hypersensitivity reactions, inflammation, and inflammatory disorders. |
| | human EOL-1 eosinophil | example, measurement of IL-8 production by FMAT) and may be used or routinely | Additional highly preferred indications include immune and hematopoietic |
| | cells) | modified to assess the ability of polypeptides of the invention (including antibodies and | disorders (e.g., as described below under “Immune Activity”, and “Blood- |
| | | agonists or antagonists of the invention) to promote or inhibit. Eosinophils are a type of | Related Disorders”), autoimmune diseases (e.g., rheumatoid arthritis, systemic |
| | | immune cell important in allergic responses; they are recruited to tissues and mediate the | lupus erythematosis, Crohn''s disease, multiple sclerosis and/or as described |
| | | inflammtory response of late stage allergic reaction. IL8 is a strong immunomodulator and | below), immunodeficiencies (e.g., as described below). Highly preferred |
| | | may have a potential proinflammatory role in immunological diseases and disorders (such | indications also include boosting or inhibiting immune cell proliferation. |
| | | as allergy and asthma). | Preferred indications include neoplastic diseases (e.g., leukemia, lymphoma, |
| | | | and/or as described below under “Hyperproliferative Disorders”). Highly |
| | | | preferred indications include boosting an eosinophil-mediated immune |
| | | | response, and suppressing an eosinophil-mediated immune response. |
| 71 | Production of MCP-1 | MCP-1 FMAT. Assays for immunomodulatory proteins that are produced by a large | A highly preferred embodiment of the invention includes a method for |
| | | variety of cells and act to induce chemotaxis and activation of monocytes and T cells are | stimulating (e.g., increasing) MCP-1 production. An alternative highly |
| | | well known in the art and may be used or routinely modified to assess the ability of | preferred embodiment of the invention includes a method for inhibiting (e.g., |
| | | polypeptides of the invention (including antibodies and agonists or antagonists of the | reducing) MCP-1 production. A highly preferred indication is infection |
| | | invention) to mediate immunomodulation, induce chemotaxis, and modulate immune cell | (e.g., an infectious disease as described below under “Infectious Disease”). |
| | | activation. Exemplary assays that test for immunomodulatory proteins evaluate the | Additional highly preferred indications include inflammation and |
| | | production of cell surface markers, such as monocyte chemoattractant protein (MCP), and | inflammatory disorders. Preferred indications include blood disorders |
| | | the activation of monocytes and T cells. Such assays that may be used or routinely | (e.g., as described below under “Immune Activity”, “Blood-Related |
| | | modified to test immunomodulatory and diffferentiation activity of polypeptides of the | Disorders”, and/or “Cardiovascular Disorders”). Highly preferred indications |
| | | invention (including antibodies and agonists or antagonists of the invention) include assays | include autoimmune diseases (e.g., rheumatoid arthritis, systemic lupus |
| | | disclosed in Miraglia et al., J Biomolecular Screening 4: 193-204(1999); Rowland et al., | erythematosis, multiple sclerosis and/or as described below) and |
| | | “Lymphocytes: a practical approach” Chapter 6: 138-160 (2000); Satthaporn and Eremin, J | immunodeficiencies (e.g., as described below). Preferred indications also |
| | | R Coll Surg Ednb 45(1): 9-19 (2001); and Verhasselt et al., J Immunol 158: 2919-2925 | include anemia, pancytopenia, leukopenia, thrombocytopenia, Hodgkin's |
| | | (1997), the contents of each of which are herein incorporated by reference in its entirety. | disease, acute lymphocytic anemia (ALL), plasmacytomas, multiple myeloma, |
| | | Human dendritic cells that may be used according to these assays may be isolated using | Burkitt's lymphoma, arthritis, AIDS, granulomatous disease, inflammatory |
| | | techniques disclosed herein or otherwise known in the art. Human dendritic cells are | bowel disease, sepsis, neutropenia, neutrophilia, psoriasis, suppression of |
| | | antigen presenting cells in suspension culture, which, when activated by antigen and/or | immune reactions to transplanted organs and tissues, hemophilia, |
| | | cytokines, initiate and upregulate T cell proliferation and functional activities. | hypercoagulation, diabetes mellitus, endocarditis, meningitis (bacterial and |
| | | | viral), Lyme Disease, asthma, and allergy Preferred indications also include |
| | | | neoplastic diseases (e.g., leukemia, lymphoma, and/or as described below |
| | | | under “Hyperproliferative Disorders”). Highly preferred indications include |
| | | | neoplasms and cancers, such as, leukemia, lymphoma, prostate, breast, lung, |
| | | | colon, pancreatic, esophageal, stomach, brain, liver, and urinary cancer. Other |
| | | | preferred indications include benign dysproliferative disorders and pre- |
| | | | neoplastic conditions, such as, for example, hyperplasia, metaplasia, and/or |
| | | | dysplasia. |
| 72 | Production of MIP1alpha | MIP-1alpha FMAT. Assays for immunomodulatory proteins produced by activated | A highly preferred embodiment of the invention includes a method for |
| | | dendritic cells that upregulate monocyte/macrophage and T cell chemotaxis are well | stimulating MIP1a production. An alternative highly preferred embodiment of |
| | | known in the art and may be used or routinely modified to assess the ability of | the invention includes a method for inhibiting (e.g., reducing) MIP1a |
| | | polypeptides of the invention (including antibodies and agonists or antagonists of the | production. A highly preferred indication is infection (e.g., an infectious |
| | | invention) to mediate immunomodulation, modulate chemotaxis, and modulate T cell | disease as described below under “Infectious Disease”). Preferred |
| | | differentiation. Exemplary assays that test for immunomodulatory proteins evaluate the | indications include blood disorders (e.g., as described below under “Immune |
| | | production of chemokines, such as macrophage inflammatory protein 1 alpha (MIP-1a), | Activity”, “Blood-Related Disorders”, and/or “Cardiovascular Disorders”). |
| | | and the activation of monocytes/macrophages and T cells. Such assays that may be used | Highly preferred indications include autoimmune diseases (e.g., rheumatoid |
| | | or routinely modified to test immunomodulatory and chemotaxis activity of polypeptides | arthritis, systemic lupus erythematosis, multiple sclerosis and/or as described |
| | | of the invention (including antibodies and agonists or antagonists of the invention) include | below) and immunodeficiencies (e.g., as described below). Additional highly |
| | | assays disclosed in Miraglia et al., J Biomolecular Screening 4: 193-204(1999); Rowland et | preferred indications include inflammation and inflammatory disorders. |
| | | al., “Lymphocytes: a practical approach” Chapter 6: 138-160 (2000); Satthaporn and | Preferred indications also include anemia, pancytopenia, leukopenia, |
| | | Eremin, J R Coll Surg Ednb 45(1): 9-19 (2001); Drakes et al., Transp Immunol 8(1): 17-29 | thrombocytopenia, Hodgkin's disease, acute lymphocytic anemia (ALL), |
| | | (2000); Verhasselt et al., J Immunol 158: 2919-2925 (1997); and Nardelli et al., J Leukoc | plasmacytomas, multiple myeloma, Burkitt's lymphoma, arthritis, AIDS, |
| | | Biol 65: 822-828 (1999), the contents of each of which are herein incorporated by reference | granulomatous disease, inflammatory bowel disease, sepsis, neutropenia, |
| | | in its entirety. Human dendritic cells that may be used according to these assays may be | neutrophilia, psoriasis, suppression of immune reactions to transplanted |
| | | isolated using techniques disclosed herein or otherwise known in the art. Human dendritic | organs and tissues, hemophilia, hypercoagulation, diabetes mellitus, |
| | | cells are antigen presenting cells in suspension culture, which, when activated by antigen | endocarditis, meningitis, Lyme Disease, asthma, and allergy. Preferred |
| | | and/or cytokines, initiate and upregulate T cell proliferation and functional activities. | indications also include neoplastic diseases (e.g., leukemia, lymphoma, and/or |
| | | | as described below under “Hyperproliferative Disorders”). Highly preferred |
| | | | indications include neoplasms and cancers, such as, leukemia, lymphoma, |
| | | | prostate, breast, lung, colon, pancreatic, esophageal, stomach, brain, liver, and |
| | | | urinary cancer. Other preferred indications include benign dysproliferative |
| | | | disorders and pre-neoplastic conditions, such as, for example, hyperplasia, |
| | | | metaplasia, and/or dysplasia. |
| 73 | Production of RANTES in | RANTES FMAT. Assays for immunomodulatory proteins that induce chemotaxis of T | |
| | bronchial epithelium cells | cells, monocytes, and eosinophils are well known in the art and may be used or routinely | |
| | | modified to assess the ability of polypeptides of the invention (including antibodies and | |
| | | agonists or antagonists of the invention) to mediate immunomodulation, induce | |
| | | chemotaxis, and/or mediate humoral or cell-mediated immunity. Exemplary assays that | |
| | | test for immunomodulatory proteins evaluate the production of cytokines, such as | |
| | | RANTES, and the induction of chemotactic responses in immune cells. Such assays that | |
| | | may be used or routinely modified to test immunomodulatory activity of polypeptides of | |
| | | the invention (including antibodies and agonists or antagonists of the invention) include | |
| | | the assays disclosed in Miraglia et al., J Biomolecular Screening 4: 193-204 (1999);: | |
| | | Cocchi et al., Science 270(5243): 1811-1815 (1995); and Robinson et al., Clin Exp | |
| | | Immunol 101(3): 398-407 (1995), the contents of each of which are herein incorporated by | |
| | | reference in its entirety. Bronchail epithelial cells play a major role in the etiology of | |
| | | respiratory conditions such as allergy response and asthma. Epithelial cells were isolated | |
| | | from bronchia/trachea immediately postmortem from humans who were free of known | |
| | | respiratory diseases. See Wu et al., Am Rev Respir Dis. 132(2): 311-20 (1985), the | |
| | | contents of which are herein incorporated by reference in its entirety. | |
| 74 | Production of RANTES in | RANTES FMAT. Assays for immunomodulatory proteins that induce chemotaxis of T | |
| | endothelial cells (such as | cells, monocytes, and eosinophils are well known in the art and may be used or routinely | |
| | human umbilical vein | modified to assess the ability of polypeptides of the invention (including antibodies and | |
| | endothelial cells (HUVEC)) | agonists or antagonists of the invention) to mediate immunomodulation, induce | |
| | | chemotaxis, and/or mediate humoral or cell-mediated immunity. Exemplary assays that | |
| | | test for immunomodulatory proteins evaluate the production of cytokines, such as | |
| | | RANTES, and the induction of chemotactic responses in immune cells. Such assays that | |
| | | may be used or routinely modified to test immunomodulatory activity of polypeptides of | |
| | | the invention (including antibodies and agonists or antagonists of the invention) include | |
| | | the assays disclosed in Miraglia et al., J Biomolecular Screening 4: 193-204 (1999); | |
| | | Rowland et al., “Lymphocytes: a practical approach” Chapter 6: 138-160 (2000): Cocchi et | |
| | | al., Science 270(5243): 1811-1815 (1995); and Robinson et al., Clin Exp Immunol | |
| | | 101(3): 398-407 (1995), the contents of each of which are herein incorporated by reference | |
| | | in its entirety. Endothelial cells that may be used according to these assays are publicly | |
| | | available (e.g., through the ATCC ™). Exemplary endothelial cells that may be used | |
| | | according to these assays include human umbilical vein endothelial cells (HUVEC), which | |
| | | are endothelial cells which line venous blood vessels, and are involved in functions that | |
| | | include, but are not limited to, angiogenesis, vascular permeability, vascular tone, and | |
| | | immune cell extravasation. | |
| 75 | Production of TNF alpha by | TNFa FMAT. Assays for immunomodulatory proteins produced by activated | A highly preferred embodiment of the invention includes a method for |
| | dendritic cells | macrophages, T cells, fibroblasts, smooth muscle, and other cell types that exert a wide | inhibiting (e.g., decreasing) TNF alpha production. An alternative highly |
| | | variety of inflammatory and cytotoxic effects on a variety of cells are well known in the art | preferred embodiment of the invention includes a method for stimulating |
| | | and may be used or routinely modified to assess the ability of polypeptides of the invention | (e.g., increasing) TNF alpha production. Highly preferred indications |
| | | (including antibodies and agonists or antagonists of the invention) to mediate | include blood disorders (e.g., as described below under “Immune Activity”, |
| | | immunomodulation, modulate inflammation and cytotoxicity. Exemplary assays that test | “Blood-Related Disorders”, and/or “Cardiovascular Disorders”), Highly |
| | | for immunomodulatory proteins evaluate the production of cytokines such as tumor | preferred indications include autoimmune diseases (e.g., rheumatoid arthritis, |
| | | necrosis factor alpha (TNFa), and the induction or inhibition of an inflammatory or | systemic lupus erythematosis, Crohn''s disease, multiple sclerosis and/or as |
| | | cytotoxic response. Such assays that may be used or routinely modified to test | described below), immunodeficiencies (e.g., as described below), boosting a T |
| | | immunomodulatory activity of polypeptides of the invention (including antibodies and | cell-mediated immune response, and suppressing a T cell-mediated immune |
| | | agonists or antagonists of the invention) include assays disclosed in Miraglia et al., J | response. Additional highly preferred indications include inflammation and |
| | | Biomolecular Screening 4: 193-204(1999); Rowland et al., “Lymphocytes: a practical | inflammatory disorders, and treating joint damage in patients with rheumatoid |
| | | approach” Chapter 6: 138-160 (2000); Verhasselt et al., Eur J Immunol 28(11): 3886-3890 | arthritis. An additional highly preferred indication is sepsis. Highly |
| | | (1198); Dahlen et al., J Immunol 160(7): 3585-3593 (1998); Verhasselt et al., J Immunol | preferred indications include neoplastic diseases (e.g., leukemia, lymphoma, |
| | | 158: 2919-2925 (1997); and Nardelli et al., J Leukoc Biol 65: 822-828 (1999), the contents | and/or as described below under “Hyperproliferative Disorders”). |
| | | of each of which are herein incorporated by reference in its entirety. Human dendritic cells | Additionally, highly preferred indications include neoplasms and cancers, |
| | | that may be used according to these assays may be isolated using techniques disclosed | such as, leukemia, lymphoma, melanoma, glioma (e.g., malignant glioma), |
| | | herein or otherwise known in the art. Human dendritic cells are antigen presenting cells in | solid tumors, and prostate, breast, lung, colon, pancreatic, esophageal, |
| | | suspension culture, which, when activated by antigen and/or cytokines, initiate and | stomach, brain, liver and urinary cancer. Other preferred indications include |
| | | upregulate T cell proliferation and functional activities, | benign dysproliferative disorders and pre-neoplastic conditions, such as, for |
| | | | example, hyperplasia, metaplasia, and/or dysplasia. Preferred indications |
| | | | include anemia, pancytopenia, leukopenia, thrombocytopenia, Hodgkin's |
| | | | disease, acute lymphocytic anemia (ALL), plasmacytomas, multiple myeloma, |
| | | | Burkitt's lymphoma, arthritis, AIDS, granulomatous disease, inflammatory |
| | | | bowel disease, neutropenia, neutrophilia, psoriasis, suppression of immune |
| | | | reactions to transplanted organs and tissues, hemophilia, hypercoagulation, |
| | | | diabetes mellitus, endocarditis, meningitis, Lyme Disease, cardiac reperfusion |
| | | | injury, and asthma and allergy. An additional preferred indication is |
| | | | infection (e.g., an infectious disease as described below under “Infectious |
| | | | Disease”). |
| 76 | Production of VCAM in | Assays for measuring expression of VCAM are well-known in the art and may be used or | Highly preferred indications include inflammation (acute and chronic), |
| | endothelial cells (such as | routinely modified to assess the ability of polypeptides of the invention (including | restnosis, atherosclerosis, asthma and allergy. Highly preferred indications |
| | human umbilical vein | antibodies and agonists or antagonists of the invention) to regulate VCAM expression. For | include inflammation and inflammatory disorders, immunological disorders, |
| | endothelial cells (HUVEC)) | example, FMAT may be used to meaure the upregulation of cell surface VCAM-1 | neoplastic disorders (e.g. cancer/tumorigenesis), and cardiovascular disorders |
| | | expresssion in endothelial cells. Endothelial cells are cells that line blood vessels, and are | (such as described below under “Immune Activity”, “Blood-Related |
| | | involved in functions that include, but are not limited to, angiogenesis, vascular | Disorders”, “Hyperproliferative Disorders” and/or “Cardiovascular |
| | | permeability, vascular tone, and immune cell extravasation. Exemplary endothelial cells | Disorders”). Highly preferred indications include neoplasms and cancers such |
| | | that may be used according to these assays include human umbilical vein endothelial cells | as, for example, leukemia, lymphoma, melanoma, renal cell carcinoma, and |
| | | (HUVEC), which are available from commercial sources. The expression of VCAM | prostate, breast, lung, colon, pancreatic, esophageal, stomach, brain, liver and |
| | | (CD106), a membrane-associated protein, can be upregulated by cytokines or other factors, | urinary cancer. Other preferred indications include benign dysproliferative |
| | | and contributes to the extravasation of lymphocytes, leucocytes and other immune cells | disorders and pre-neoplastic conditions, such as, for example, hyperplasia, |
| | | from blood vessels; thus VCAM expression plays a role in promoting immune and | metaplasia, and/or dysplasia. |
| | | inflammatory responses. | |
| 77 | Proliferation of pre-adipose | Assays for the regulation (i.e. increases or decreases) of viability and proliferation of cells | |
| | cells (such as 3T3-L1 cells) | in vitro are well-known in the art and may be used or routinely modified to assess the | |
| | | ability of polypeptides of the invention (including antibodies and agonists or antagonists of | |
| | | the invention) to regulate viability and proliferation of pre-adipose cells and cell lines. For | |
| | | example, the CellTiter-Gloo Luminescent Cell Viability Assay (PROMEGA ™ Corp., | |
| | | Madison, WI, USA) can be used to measure the number of viable cells in culture based on | |
| | | quantitation of the ATP present which signals the presence of metabolically active cells. | |
| | | 3T3-L1 is a mouse preadipocyte cell line. It is a continuous substrain of 3T3 fibroblast | |
| | | cells developed through clonal isolation. Cells were differentiated to an adipose-like state | |
| | | before being used in the screen. See Green H and Meuth M., Cell 3: 127-133 (1974), | |
| | | which is herein incorporated by reference in its entirety. | |
| 78 | Protection from Endothelial | Caspase Apoptosis Rescue. Assays for caspase apoptosis rescue are well known in the art | A highly preferred embodiment of the invention includes a method for |
| | Cell Apoptosis. | and may be used or routinely modified to assess the ability of the polypeptides of the | stimulating endothelial cell growth. An alternative highly preferred |
| | | invention (including antibodies and agonists or antagonists of the invention) to inhibit | embodiment of the invention includes a method for inhibiting endothelial cell |
| | | caspase protease-mediated apoptosis. Exemplary assays for caspase apoptosis that may be | growth. A highly preferred embodiment of the invention includes a method |
| | | used or routinely modified to test caspase apoptosis rescue of polypeptides of the invention | for stimulating endothelial cell proliferation. An alternative highly preferred |
| | | (including antibodies and agonists or antagonists of the invention) include the assays | embodiment of the invention includes a method for inhibiting endothelial cell |
| | | disclosed in Romeo et al., Cardiovasc Res 45(3): 788-794 (2000); Messmer et al., Br J Pharmacol | proliferation. A highly preferred embodiment of the invention includes a |
| | | 127(7): 1633-1640 (1999); and J Atheroscler Thromb 3(2): 75-80 (1996); the | method for stimulating endothelial cell growth. An alternative highly |
| | | contents of each of which are herein incorporated by reference in its entirety. Endothelial | preferred embodiment of the invention includes a method for inhibiting |
| | | cells that may be used according to these assays are publicly available (e.g., through | endothelial cell growth. A highly preferred embodiment of the invention |
| | | commercial sources). Exemplary endothelial cells that may be used according to these | includes a method for stimulating apoptosis of endothelial cells. An alternative |
| | | assays include bovine aortic endothelial cells (bAEC), which are an example of endothelial | highly preferred embodiment of the invention includes a method for inhibiting |
| | | cells which line blood vessels and are involved in functions that include, but are not | (e.g., decreasing) apoptosis of endothelial cells. A highly preferred |
| | | limited to, angiogenesis, vascular permeability, vascular tone, and immune cell | embodiment of the invention includes a method for stimulating angiogenisis. |
| | | extravasation. | An alternative highly preferred embodiment of the invention includes a |
| | | | method for inhibiting angiogenesis. A highly preferred embodiment of the |
| | | | invention includes a method for reducing cardiac hypertrophy. An alternative |
| | | | highly preferred embodiment of the invention includes a method for inducing |
| | | | cardiac hypertrophy. Highly preferred indications include neoplastic |
| | | | diseases (e.g., as described below under “Hyperproliferative Disorders”), and |
| | | | disorders of the cardiovascular system (e.g., heart disease, congestive heart |
| | | | failure, hypertension, aortic stenosis, cardiomyopathy, valvular regurgitation, |
| | | | left ventricular dysfunction, atherosclerosis and atherosclerotic vascular |
| | | | disease, diabetic nephropathy, intracardiac shunt, cardiac hypertrophy, |
| | | | myocardial infarction, chronic hemodynamic overload, and/or as described |
| | | | below under “Cardiovascular Disorders”). Highly preferred indications |
| | | | include cardiovascular, endothelial and/or angiogenic disorders (e.g., |
| | | | systemic disorders that affect vessels such as diabetes mellitus, as well as |
| | | | diseases of the vessels themselves, such as of the arteries, capillaries, veins |
| | | | and/or lymphatics). Highly preferred are indications that stimulate |
| | | | angiogenesis and/or cardiovascularization. Highly preferred are indications |
| | | | that inhibit angiogenesis and/or cardiovascularization. Highly preferred |
| | | | indications include antiangiogenic activity to treat solid tumors, leukemias, |
| | | | and Kaposi''s sarcoma, and retinal disorders. Highly preferred indications |
| | | | include neoplasms and cancer, such as, Kaposi''s sarcoma, hemangioma |
| | | | (capillary and cavernous), glomus tumors, telangiectasia, bacillary |
| | | | angiomatosis, hemangioendothelioma, angiosarcoma, haemangiopericytoma, |
| | | | lymphangioma, lymphangiosarcoma. Highly preferred indications also |
| | | | include cancers such as, prostate, breast, lung, colon, pancreatic, esophageal, |
| | | | stomach, brain, liver, and urinary cancer. Preferred indications include benign |
| | | | dysproliferative disorders and pre-neoplastic conditions, such as, for example, |
| | | | hyperplasia, metaplasia, and/or dysplasia. Highly preferred indications |
| | | | also include arterial disease, such as, atherosclerosis, hypertension, coronary |
| | | | artery disease, inflammatory vasculitides, Reynaud''s disease and Reynaud''s |
| | | | phenomenom, aneurysms, restenosis; venous and lymphatic disorders such as |
| | | | thrombophlebitis, lymphangitis, and lymphedema; and other vascular |
| | | | disorders such as peripheral vascular disease, and cancer. Highly preferred |
| | | | indications also include trauma such as wounds, burns, and injured tissue |
| | | | (e.g., vascular injury such as, injury resulting from balloon angioplasty, and |
| | | | atheroschlerotic lesions), implant fixation, scarring, ischemia reperfusion |
| | | | injury, rheumatoid arthritis, cerebrovascular disease, renal diseases such as |
| | | | acute renal failure, and osteoporosis. Additional highly preferred |
| | | | indications include stroke, graft rejection, diabetic or other retinopathies, |
| | | | thrombotic and coagulative disorders, vascularitis, lymph angiogenesis, sexual |
| | | | disorders, age-related macular degeneration, and treatment/prevention of |
| | | | endometriosis and related conditions. Additional highly preferred indications |
| | | | include fibromas, heart disease, cardiac arrest, heart valve disease, and |
| | | | vascular disease. Preferred indications include blood disorders (e.g., as |
| | | | described below under “Immune Activity”, “Blood-Related Disorders”, and/or |
| | | | “Cardiovascular Disorders”). Preferred indications include autoimmune |
| | | | diseases (e.g., rheumatoid arthritis, systemic lupus erythematosis, multiple |
| | | | sclerosis and/or as described below) and immunodeficiencies (e.g., as |
| | | | described below). Additional preferred indications include inflammation and |
| | | | inflammatory disorders (such as acute and chronic inflammatory diseases, |
| | | | e.g., inflammatory bowel disease and Crohn's disease), and pain management. |
| 79 | Regulation of apoptosis in | Caspase Apoptosis. Assays for caspase apoptosis are well known in the art and may be | A highly preferred indication is diabetes mellitus. An additional |
| | pancreatic beta cells, | used or routinely modified to assess the ability of polypeptides of the invention (including | highly preferred indication is a complication associated with diabetes (e.g., |
| | | antibodies and agonists or antagonists of the invention) to promote caspase protease- | diabetic retinopathy, diabetic nephropathy, kidney disease (e.g., renal failure, |
| | | mediated apoptosis. Apoptosis in pancreatic beta is associated with induction and | nephropathy and/or other diseases and disorders as described in the “Renal |
| | | progression of diabetes. Exemplary assays for caspase apoptosis that may be used or | Disorders” section below), diabetic neuropathy, nerve disease and nerve |
| | | routinely modified to test capase apoptosis activity of polypeptides of the invention | damage (e.g., due to diabetic neuropathy), blood vessel blockage, heart |
| | | (including antibodies and agonists or antagonists of the invention) include the assays | disease, stroke, impotence (e.g., due to diabetic neuropathy or blood vessel |
| | | disclosed in: Loweth, AC, et al., FEBS Lett, 400(3): 285-8 (1997); Saini, KS, et al., | blockage), seizures, mental confusion, drowsiness, nonketotic hyperglycemic- |
| | | Biochem Mol Biol Int, 39(6): 1229-36 (1996); Krautheim, A., et al., Br J Pharmacol, | hyperosmolar coma, cardiovascular disease (e.g., heart disease, |
| | | 129(4): 687-94 (2000); Chandra J, et al., Diabetes, 50 Suppl 1: S44-7 (2001); Suk K, et al., J | atherosclerosis, microvascular disease, hypertension, stroke, and other |
| | | Immunol, 166(7): 4481-9 (2001); Tejedo J, et al., FEBS Lett, 459(2): 238-43 (1999); Zhang, S., | diseases and disorders as described in the “Cardiovascular Disorders” section |
| | | et al., FEBS Lett, 455(3): 315-20 (1999); Lee et al., FEBS Lett 485(2-3): 122-126 | below), dyslipidemia, endocrine disorders (as described in the “Endocrine |
| | | (2000); Nor et al., J Vasc Res 37(3): 209-218 (2000); and Karsan and Harlan, J | Disorders” section below), neuropathy, vision impairment (e.g., diabetic |
| | | Atheroscler Thromb 3(2): 75-80 (1996); the contents of each of which are herein | retinopathy and blindness), ulcers and impaired wound healing, and infection |
| | | incorporated by reference in its entirety. Pancreatic cells that may be used according to | (e.g., infectious diseases and disorders as described in the “Infectious |
| | | these assays are publicly available (e.g., through the ATCC ™) and/or may be routinely | Diseases” section below, especially of the urinary tract and skin), carpal tunnel |
| | | generated. Exemplary pancreatic cells that may be used according to these assays include | syndrome and Dupuytren's contracture). An additional highly preferred |
| | | RIN-m. RIN-m is a rat adherent pancreatic beta cell insulinoma cell line derived from a | indication is obesity and/or complications associated with obesity. Additional |
| | | radiation induced transplantable rat islet cell tumor. The cells produce and secrete islet | highly preferred indications include weight loss or alternatively, weight gain. |
| | | polypeptide hormones, and produce insulin, somatostatin, and possibly glucagon. ATTC: | Aditional highly preferred indications are comnplications associated with |
| | | #CRL-2057 Chick et al. Proc. Natl. Acad. Sci. 1977 74: 628; AF et al. Proc. Natl. Acad. | insulin resistance. |
| | | Sci. 1980 77: 3519. | |
| 80 | Regulation of apoptosis of | Caspase Apoptosis. Assays for caspase apoptosis are well known in the art and may be | Preferred embodiments of the invention include using polypeptides of the |
| | immune cells (such as mast | used or routinely modified to assess the ability of polypeptides of the invention including | invention (or antibodies, agonists, or antagonists thereof) in detection, |
| | cells). | antibodies and agonists or antagonists of the invention) to regulate caspase protease- | diagnosis, prevention, and/or treatment of asthma, allergy, hypersensitivity |
| | | mediated apoptosis in immune cells (such as, for example, in mast cells). Mast cells are | and inflammation. |
| | | found in connective and mucosal tissues throughout the body, and their activation via | |
| | | immunoglobulin E-antigen, promoted by T helper cell type 2 cytokines, is an important | |
| | | component of allergic disease. Dysregulation of mast cell apoptosis may play a role in | |
| | | allergic disease and mast cell tumor survival. Exemplary assays for caspase apoptosis that | |
| | | may be used or routinely modified to test capase apoptosis activity induced by | |
| | | polypeptides of the invention (including antibodies and agonists or antagonists of the | |
| | | invention) include the assays disclosed in: Masuda A, et al., J Biol Chem, 276(28): 26107-26113 | |
| | | (2001); Yeatman CF 2nd, et al., J Exp Med, 192(8): 1093-1103 (2000); Lee et al., | |
| | | FEBS Lett 485(2-3): 122-126 (2000); Nor et al., J Vasc Res 37(3): 209-218 (2000); and | |
| | | Karsan and Harlan, J Atheroscler Thromb 3(2): 75-80 (1996); the contents of each of | |
| | | which are herein incorporated by reference in its entirety. Immune cells that may be used | |
| | | according to these assays are publicly available (e.g., through commercial sources). | |
| | | Exemplary immune cells that may be used according to these assays include mast cells | |
| | | such as the HMC human mast cell line. | |
| 81 | Regulation of proliferation | Kinase assays, for example an Elk-1 kinase assay for ERK signal transduction that | Preferred embodiments of the invention include using polypeptides of the |
| | and/or differentiation in | regulates cell proliferation or differentiation, are well known in the art and may be used or | invention (or antibodies, agonists, or antagonists thereof) in detection, |
| | immune cells (such as mast | routinely modified to assess the ability of polypeptides of the invention (including | diagnosis, prevention, and/or treatment of asthma, allergy, hypersensitivity |
| | cells). | antibodies and agonists or antagonists of the invention) to promote or inhibit cell | and inflammation. |
| | | proliferation, activation, and differentiation. Exemplary assays for ERK kinase activity | |
| | | that may be used or routinely modified to test ERK kinase-induced activity of polypeptides | |
| | | of the invention (including antibodies and agonists or antagonists of the invention) include | |
| | | the assays disclosed in: Ali H, et al., J Immunol, 165(12): 7215-7223 (2000); Tam SY, et | |
| | | al., Blood, 90(5): 1807-1820 (1997); Forrer et al., Biol Chem 379(8-9): 1101-1110 (1998); | |
| | | Berra et al., Biochem Pharmacol 60(8): 1171-1178 (2000); Gupta et al., Exp Cell Res | |
| | | 247(2): 495-504 (1999); Chang and Karin, Nature 410(6824): 37-40 (2001); and Cobb MH, | |
| | | Prog Biophys Mol Biol 71(3-4): 479-500 (1999); the contents of each of which are herein | |
| | | incorporated by reference in its entirety. Exemplary immune cells that may be used | |
| | | according to these assays include human mast cells such as the HMC-1 cell line. | |
| 82 | Regulation of transcription of | Assays for the regulation of transcription of Malic Enzyme are well-known in the art and | A highly preferred indication is diabetes mellitus. An additional |
| | Malic Enzyme in adipocytes | may be used or routinely modified to assess the ability of polypeptides of the invention | highly preferred indication is a complication associated with diabetes (e.g., |
| | | (including antibodies and agonists or antagonists of the invention) to regulate transcription | diabetic retinopathy, diabetic nephropathy, kidney disease (e.g., renal failure, |
| | | of Malic Enzyme, a key enzyme in lipogenesis. Malic enzyme is involved in | nephropathy and/or other diseases and disorders as described in the “Renal |
| | | lipogenesisand its expression is stimulted by insulin. ME promoter contains two direct | Disorders” section below), diabetic neuropathy, nerve disease and nerve |
| | | repeat (DR1)-like elements MEp and MEd identified as putative PPAR response | damage (e.g., due to diabetic neuropathy), blood vessel blockage, heart |
| | | elements. ME promoter may also responds to AP1 and other transcription factors. | disease, stroke, impotence (e.g., due to diabetic neuropathy or blood vessel |
| | | Exemplary assays that may be used or routinely modified to test for regulation of | blockage), seizures, mental confusion, drowsiness, nonketotic hyperglycemic- |
| | | transcription of Malic Enzyme (in adipoocytes) by polypeptides of the invention (including | hyperosmolar coma, cardiovascular disease (e.g., heart disease, |
| | | antibodies and agonists or antagonists of the invention) include assays disclosed in: | atherosclerosis, microvascular disease, hypertension, stroke, and other |
| | | Streeper, R. S., et al., Mol Endocrinol, 12(11): 1778-91 (1998); Garcia-Jimenez, C., et al., | diseases and disorders as described in the “Cardiovascular Disorders” section |
| | | Mol Endocrinol, 8(10): 1361-9 (1994); Barroso, I., et al., J Biol Chem, 274(25): 17997-8004 | below), dyslipidemia, endocrine disorders (as described in the “Endocrine |
| | | (1999); Ijpenberg, A., et al., J Biol Chem, 272(32): 20108-20117 (1997); Berger, et | Disorders” section below), neuropathy, vision impairment (e.g., diabetic |
| | | al., Gene 66: 1-10 (1988); and, Cullen, B., et al., Methods in Enzymol. 216: 362-368 | retinopathy and blindness), ulcers and impaired wound healing, and infection |
| | | (1992), the contents of each of which is herein incorporated by reference in its entirety. | (e.g., infectious diseases and disorders as described in the “Infectious |
| | | Hepatocytes that may be used according to these assays are publicly available (e.g., | Diseases” section below, especially of the urinary tract and skin), carpal tunnel |
| | | through the ATCC ™) and/or may be routinely generated. Exemplary hepatocytes that | syndrome and Dupuytren's contracture). An additional highly preferred |
| | | may be used according to these assays includes the H4IIE rat liver hepatoma cell line. | indication is obesity and/or complications associated with obesity. Additional |
| | | | highly preferred indications include weight loss or alternatively, weight gain. |
| | | | Aditional highly preferred indications are complications associated with |
| | | | insulin resistance. |
| 83 | Regulation of transcription of | Assays for the regulation of transcription of Malic Enzyme are well-known in the art and | A highly preferred indication is diabetes mellitus. An additional |
| | Malic Enzyme in hepatocytes | may be used or routinely modified to assess the ability of polypeptides of the invention | highly preferred indication is a complication associated with diabetes (e.g., |
| | | (including antibodies and agonists or antagonists of the invention) to regulate transcription | diabetic retinopathy, diabetic nephropathy, kidney disease (e.g., renal failure, |
| | | of Malic Enzyme, a key enzyme in lipogenesis. Malic enzyme is involved in | nephropathy and/or other diseases and disorders as described in the “Renal |
| | | lipogenesisand its expression is stimulted by insulin. ME promoter contains two direct | Disorders” section below), diabetic neuropathy, nerve disease and nerve |
| | | repeat (DR1)-like elements MEp and MEd identified as putative PPAR response | damage (e.g., due to diabetic neuropathy), blood vessel blockage, heart |
| | | elements. ME promoter may also responds to AP1 and other transcription factors. | disease, stroke, impotence (e.g., due to diabetic neuropathy or blood vessel |
| | | Exemplary assays that may be used or routinely modified to test for regulation of | blockage), seizures, mental confusion, drowsiness, nonketotic hyperglycemic- |
| | | transcription of Malic Enzyme (in hepatocytes) by polypeptides of the invention (including | hyperosmolar coma, cardiovascular disease (e.g., heart disease, |
| | | antibodies and agonists or antagonists of the invention) include assays disclosed in: | atherosclerosis, microvascular disease, hypertension, stroke, and other |
| | | Streeper, R. S., et al., Mol Endocrinol, 12(11): 1778-91 (1998); Garcia-Jimenez, C., et al., | diseases and disorders as described in the “Cardiovascular Disorders” section |
| | | Mol Endocrinol, 8(10): 1361-9 (1994); Barroso, I., et al., J Biol Chem, 274(25): 17997-8004 | below), dyslipidemia, endocrine disorders (as described in the “Endocrine |
| | | (1999); Ijpenberg, A., et al., J Biol Chem, 272(32): 20108-20117 (1997); Berger, et | Disorders” section below), neuropathy, vision impairment (e.g., diabetic |
| | | al., Gene 66: 1-10 (1988); and, Cullen, B., et al., Methods in Enzymol. 216: 362-368 | retinopathy and blindness), ulcers and impaired wound healing, and infection |
| | | (1992), the contents of each of which is herein incorporated by reference in its entirety. | (e.g., infectious diseases and disorders as described in the “Infectious |
| | | Hepatocytes that may be used according to these assays are publicly available (e.g., | Diseases” section below, especially of the urinary tract and skin), carpal tunnel |
| | | through the ATCC ™) and/or may be routinely generated. Exemplary hepatocytes that | syndrome and Dupuytren's contracture). An additional highly preferred |
| | | may be used according to these assays includes the mouse 3T3-L1 cell line. 3T3-L1 is a | indication is obesity and/or complications associated with obesity. Additional |
| | | mouse preadipocyte cell line (adherent). It is a continuous substrain of 3T3 fibroblasts | highly preferred indications include weight loss or alternatively, weight gain. |
| | | developed through clonal isolation. Cells undergo a pre-adipocyte to adipose-like | Aditional highly preferred indications are complications associated with |
| | | conversion under appropriate differentiation culture conditions. | insulin resistance. |
| 84 | Regulation of transcription | Assays for the regulation of transcription through the FAS promoter element are well- | A highly preferred indication is diabetes mellitus. An additional |
| | through the FAS promoter | known in the art and may be used or routinely modified to assess the ability of | highly preferred indication is a complication associated with diabetes (e.g., |
| | element in hepatocytes | polypeptides of the invention (including antibodies and agonists or antagonists of the | diabetic retinopathy, diabetic nephropathy, kidney disease (e.g., renal failure, |
| | | invention) to activate the FAS promoter element in a reporter construct and to regulate | nephropathy and/or other diseases and disorders as described in the “Renal |
| | | transcription of FAS, a key enzyme for lipogenesis. FAS promoter is regulated by many | Disorders” section below), diabetic neuropathy, nerve disease and nerve |
| | | transcription factors including SREBP. Insulin increases FAS gene transcription in livers | damage (e.g., due to diabetic neuropathy), blood vessel blockage, heart |
| | | of diabetic mice. This stimulation of transcription is also somewhat glucose dependent. | disease, stroke, impotence (e.g., due to diabetic neuropathy or blood vessel |
| | | Exemplary assays that may be used or routinely modified to test for FAS promoter element | blockage), seizures, mental confusion, drowsiness, nonketotic hyperglycemic- |
| | | activity (in hepatocytes) by polypeptides of the invention (including antibodies and | hyperosmolar coma, cardiovascular disease (e.g., heart disease, |
| | | agonists or antagonists of the invention) include assays disclosed in Xiong, S., et al., Proc | atherosclerosis, microvascular disease, hypertension, stroke, and other |
| | | Natl Acad Sci U.S.A., 97(8): 3948-53 (2000); Roder, K., et al., Eur J Biochem, 260(3): 743-51 | diseases and disorders as described in the “Cardiovascular Disorders” section |
| | | (1999); Oskouian B, et al., Biochem J, 317 (Pt 1): 257-65 (1996); Berger, et al., Gene | below), dyslipidemia, endocrine disorders (as described in the “Endocrine |
| | | 66: 1-10 (1988); and, Cullen, B., et al., Methods in Enzymol. 216: 362-368 (1992), the | Disorders” section below), neuropathy, vision impairment (e.g., diabetic |
| | | contents of each of which is herein incorporated by reference in its entirety. Hepatocytes | retinopathy and blindness), ulcers and impaired wound healing, and infection |
| | | that may be used according to these assays, such as H4IIE cells, are publicly available | (e.g., infectious diseases and disorders as described in the “Infectious |
| | | (e.g., through the ATCC ™) and/or may be routinely generated. Exemplary hepatocytes | Diseases” section below, especially of the urinary tract and skin), carpal tunnel |
| | | that may be used according to these assays include rat liver hepatoma cell line(s) inducible | syndrome and Dupuytren's contracture). An additional highly preferred |
| | | with glucocorticoids, insulin, or cAMP derivatives. | indication is obesity and/or complications associated with obesity. Additional |
| | | | highly preferred indications include weight loss or alternatively, weight gain. |
| | | | Aditional highly preferred indications are complications associated with |
| | | | insulin resistance. |
| 85 | Regulation of transcription | Assays for the regulation of transcription through the PEPCK promoter are well-known in | A highly preferred indication is diabetes mellitus. An additional |
| | through the PEPCK promoter | the art and may be used or routinely modified to assess the ability of polypeptides of the | highly preferred indication is a complication associated with diabetes (e.g., |
| | in hepatocytes | invention (including antibodies and agonists or antagonists of the invention) to activate the | diabetic retinopathy, diabetic nephropathy, kidney disease (e.g., renal failure, |
| | | PEPCK promoter in a reporter construct and regulate liver gluconeogenesis. Exemplary | nephropathy and/or other diseases and disorders as described in the “Renal |
| | | assays for regulation of transcription through the PEPCK promoter that may be used or | Disorders” section below), diabetic neuropathy, nerve disease and nerve |
| | | routinely modified to test for PEPCK promoter activity (in hepatocytes) of polypeptides of | damage (e.g., due to diabetic neuropathy), blood vessel blockage, heart |
| | | the invention (including antibodies and agonists or antagonists of the invention) include | disease, stroke, impotence (e.g., due to diabetic neuropathy or blood vessel |
| | | assays disclosed in Berger et al., Gene 66: 1-10 (1998); Cullen and Malm, Methods in | blockage), seizures, mental confusion, drowsiness, nonketotic hyperglycemic- |
| | | Enzymol 216: 362-368 (1992); Henthorn et al., Proc Natl Acad Sci USA 85: 6342-6346 | hyperosmolar coma, cardiovascular disease (e.g., heart disease, |
| | | (1988); Lochhead et al., Diabetes 49(6): 896-903 (2000); and Yeagley et al., J Biol Chem | atherosclerosis, microvascular disease, hypertension, stroke, and other |
| | | 275(23): 17814-17820 (2000), the contents of each of which is herein incorporated by | diseases and disorders as described in the “Cardiovascular Disorders” section |
| | | reference in its entirety. Hepatocyte cells that may be used according to these assays are | below), dyslipidemia, endocrine disorders (as described in the “Endocrine |
| | | publicly available (e.g., through the ATCC ™) and/or may be routinely generated. | Disorders” section below), neuropathy, vision impairment (e.g., diabetic |
| | | Exemplary liver hepatoma cells that may be used according to these assays include H4lle | retinopathy and blindness), ulcers and impaired wound healing, infection (e.g., |
| | | cells, which contain a tyrosine amino transferase that is inducible with glucocorticoids, | an infectious diseases or disorders as described in the “Infectious Diseases” |
| | | insulin, or cAMP derivatives. | section below, especially of the urinary tract and skin), carpal tunnel |
| | | | syndrome and Dupuytren's contracture). An additional highly preferred |
| | | | indication is obesity and/or complications associated with obesity. Additional |
| | | | highly preferred indications include weight loss or alternatively, weight gain. |
| | | | Additional highly preferred indications are complications associated with |
| | | | insulin resistance. Additional highly preferred indications are |
| | | | disorders of the musculoskeletal systems including myopathies, muscular |
| | | | dystrophy, and/or as described herein. Additional highly preferred |
| | | | indications include glycogen storage disease (e.g., glycogenoses), hepatitis, |
| | | | gallstones, cirrhosis of the liver, degenerative or necrotic liver disease, |
| | | | alcoholic liver diseases, fibrosis, liver regeneration, metabolic disease, |
| | | | dyslipidemia and cholesterol metabolism, and hepatocarcinomas. |
| | | | Highly preferred indications include blood disorders (e.g., as described below |
| | | | under “Immune Activity”, “Cardiovascular Disorders”, and/or “Blood-Related |
| | | | Disorders”), immune disorders (e.g., as described below under “Immune |
| | | | Activity”), infection (e.g., an infectious disease and/or disorder as described |
| | | | below under “Infectious Disease”), endocrine disorders (e.g., as described |
| | | | below under “Endocrine Disorders”), and neural disorders (e.g., as described |
| | | | below under “Neural Activity and Neurological Diseases”). |
| | | | Additional preferred indications include neoplastic diseases (e.g., as described |
| | | | below under “Hyperproliferative Disorders”). Preferred indications include |
| | | | neoplasms and cancers, such as, leukemia, lymphoma, prostate, breast, lung, |
| | | | colon, pancreatic, esophageal, stomach, brain, and urinary cancer. A highly |
| | | | preferred indication is liver cancer. Other preferred indications include benign |
| | | | dysproliferative disorders and pre-neoplastic conditions, such as, for example, |
| | | | hyperplasia, metaplasia, and/or dysplasia. |
| 86 | Regulation of transcription | Assays for the regulation of transcription through the DMEF1 response element are well- | A highly preferred indication is diabetes mellitus. Additional highly preferred |
| | via DMEF1 response element | known in the art and may be used or routinely modified to assess the ability of | indications include complications associated with diabetes (e.g., diabetic |
| | in adipocytes and pre- | polypeptides of the invention (including antibodies and agonists or antagonists of the | retinopathy, diabetic nephropathy, kidney disease (e.g., renal failure, |
| | adipocytes | invention) to activate the DMEF1 response element in a reporter construct (such as that | nephropathy and/or other diseases and disorders as described in the “Renal |
| | | containing the GLUT4 promoter) and to regulate insulin production. The DMEF1 | Disorders” section below), diabetic neuropathy, nerve disease and nerve |
| | | response element is present in the GLUT4 promoter and binds to MEF2 transcription | damage (e.g., due to diabetic neuropathy), blood vessel blockage, heart |
| | | factor and another transcription factor that is required for insulin regulation of Glut4 | disease, stroke, impotence (e.g., due to diabetic neuropathy or blood vessel |
| | | expression in skeletal muscle. GLUT4 is the primary insulin-responsive glucose | blockage), seizures, mental confusion, drowsiness, nonketotic hyperglycemic- |
| | | transporter in fat and muscle tissue. Exemplary assays that may be used or routinely | hyperosmolar coma, cardiovascular disease (e.g., heart disease, |
| | | modified to test for DMEF1 response element activity (in adipocytes and pre-adipocytes) | atherosclerosis, microvascular disease, hypertension, stroke, and other |
| | | by polypeptides of the invention (including antibodies and agonists or antagonists of the | diseases and disorders as described in the “Cardiovascular Disorders” section |
| | | invention) include assays disclosed inThai, M. V., et al., J Biol Chem, 273(23): 14285-92 | below), dyslipidemia, endocrine disorders (as described in the “Endocrine |
| | | (1998); Mora, S., et al., J Biol Chem, 275(21): 16323-8 (2000); Liu, M. L., et al., J Biol | Disorders” section below), neuropathy, vision impairment (e.g., diabetic |
| | | Chem, 269(45): 28514-21(1994); “Identification of a 30-base pair regulatory element and | retinopathy and blindness), ulcers and impaired wound healing, and infection |
| | | novel DNA binding protein that regulates the human GLUT4 promoter in transgenic | (e.g., infectious diseases and disorders as described in the “Infectious |
| | | mice”, J Biol Chem. 2000 Aug 4; 275(31): 23666-73; Berger, et al., Gene 66: 1-10 (1988); | Diseases” section below, especially of the urinary tract and skin). An |
| | | and, Cullen, B., et al., Methods in Enzymol. 216: 362-368 (1992), the contents of each of | additional highly preferred indication is obesity and/or complications |
| | | which is herein incorporated by reference in its entirety. Adipocytes and pre-adipocytes | associated with obesity. Additional highly preferred indications include |
| | | that may be used according to these assays are publicly available (e.g., through the | weight loss or alternatively, weight gain. Additional highly preferred |
| | | ATCC ™) and/or may be routinely generated. Exemplary cells that may be used according | indications are complications associated with insulin resistance. |
| | | to these assays include the mouse 3T3-L1 cell line which is an adherent mouse | |
| | | preadipocyte cell line. Mouse 3T3-L1 cells are a continuous substrain of 3T3 fibroblasts | |
| | | developed through clonal isolation. These cells undergo a pre-adipocyte to adipose-like | |
| | | conversion under appropriate differentiation culture conditions. | |
| 87 | Regulation of viability and | Assays for the regulation of viability and proliferation of cells in vitro are well-known in | A highly preferred indication is diabetes mellitus. An additional highly |
| | proliferation of pancreatic | the art and may be used or routinely modified to assess the ability of polypeptides of the | preferred indication is a complication associated with diabetes (e.g., diabetic |
| | beta cells. | invention (including antibodies and agonists or antagonists of the invention) to regulate | retinopathy, diabetic nephropathy, kidney disease (e.g., renal failure, |
| | | viability and proliferation of pancreatic beta cells. For example, the Cell Titer-Glo | nephropathy and/or other diseases and disorders as described in the “Renal |
| | | luminescent cell viability assay measures the number of viable cells in culture based on | Disorders” section below), diabetic neuropathy, nerve disease and nerve |
| | | quantitation of the ATP present which signals the presence of metabolically active cells. | damage (e.g., due to diabetic neuropathy), blood vessel blockage, heart |
| | | Exemplary assays that may be used or routinely modified to test regulation of viability and | disease, stroke, impotence (e.g., due to diabetic neuropathy or blood vessel |
| | | proliferation of pancreatic beta cells by polypeptides of the invention (including antibodies | blockage), seizures, mental confusion, drowsiness, nonketotic hyperglycemic- |
| | | and agonists or antagonists of the invention) include assays disclosed in: Ohtani KI, et al., | hyperosmolar coma, cardiovascular disease (e.g., heart disease, |
| | | Endocrinology, 139(1): 172-8 (1998); Krautheim A, et al, Exp Clin Endocrinol Diabetes, | atherosclerosis, microvascular disease, hypertension, stroke, and other |
| | | 107 (1): 29-34 (1999), the contents of each of which is herein incorporated by reference in | diseases and disorders as described in the “Cardiovascular Disorders” section |
| | | its entirety. Pancreatic cells that may be used according to these assays are publicly | below), dyslipidemia, endocrine disorders (as described in the “Endocrine |
| | | available (e.g., through the ATCC ™) and/or may be routinely generated. Exemplary | Disorders” section below), neuropathy, vision impairment (e.g., diabetic |
| | | pancreatic cells that may be used according to these assays include HITT15 Cells. | retinopathy and blindness), ulcers and impaired wound healing, and infection |
| | | HITT15 are an adherent epithelial cell line established from Syrian hamster islet cells | (e.g., infectious diseases and disorders as described in the “Infectious |
| | | transformed with SV40. These cells express glucagon, somatostatin, and glucocorticoid | Diseases” section below, especially of the urinary tract and skin), carpal tunnel |
| | | receptors. The cells secrete insulin, which is stimulated by glucose and glucagon and | syndrome and Dupuytren's contracture). An additional highly preferred |
| | | suppressed by somatostatin or glucocorticoids. ATTC# CRL-1777 Refs: Lord and | indication is obesity and/or complications associated with obesity. Additional |
| | | Ashcroft. Biochem. J. 219: 547-551; Santerre et al. Proc. Natl. Acad. Sci. USA 78: 4339-4343, | highly preferred indications include weight loss or alternatively, weight gain. |
| | | 1981. | Additional highly preferred indications are complications associated with |
| | | | insulin resistance. |
| 88 | Regulation of viability or | Assays for the regulation (i.e. increases or decreases) of viability and proliferation of cells | Highly preferred indications include eosinophilia, asthma, allergy, |
| | proliferation of immune cells | in vitro are well-known in the art and may be used or routinely modified to assess the | hypersensitivity reactions, inflammation, and inflammatory disorders. |
| | (such as human eosinophil | ability of polypeptides of the invention (including antibodies and agonists or antagonists of | Additional highly preferred indications include immune and hematopoietic |
| | EOL-1 cells). | the invention) to regulate viability and proliferation of eosinophil cells and cell lines. For | disorders (e.g., as described below under “Immune Activity”, and “Blood- |
| | | example, the CellTiter-Gloo Luminescent Cell Viability Assay (PROMEGA ™ Corp., | Related Disorders”), autoimmune diseases (e.g., rheumatoid arthritis, systemic |
| | | Madison, WI, USA) can be used to measure the number of viable cells in culture based on | lupus erythematosis, Crohn''s disease, multiple sclerosis and/or as described |
| | | quantitation of the ATP present which signals the presence of metabolically active cells. | below), immunodeficiencies (e.g., as described below). Highly preferred |
| | | Eosinophils are a type of immune cell important in allergic responses; they are recruited to | indications also include boosting or inhibiting immune cell proliferation. |
| | | tissues and mediate the inflammtory response of late stage allergic reaction. Eosinophil | Preferred indications include neoplastic diseases (e.g., leukemia, lymphoma, |
| | | cell lines that may be used according to these assays are publicly available and/or may be | and/or as described below under “Hyperproliferative Disorders”). Highly |
| | | routinely generated. Exemplary eosinophil cells that may be used according to these | preferred indications include boosting an eosinophil-mediated immune |
| | | assays include EOL-1 Cells. | response, and suppressing an eosinophil-mediated immune response. |
| 89 | SEAP in HepG2/Squale- | | |
| | synthetase(stimulation) | | |
| 90 | SEAP in Jurkat/IL4 promoter | | |
| 91 | SEAP in NK16/STAT6 | | |
| 92 | SEAP in OE-33 | | |
| 93 | SEAP in Senescence Assay | | |
| 94 | SEAP in SW480 | | |
| 95 | Stimulation of Calcium Flux | Assays for measuring calcium flux are well-known in the art and may be used or | A highly preferred indication is diabetes mellitus. An additional |
| | in pancreatic beta cells. | routinely modified to assess the ability of polypeptides of the invention (including | highly preferred indication is a complication associated with diabetes (e.g., |
| | | antibodies and agonists or antagonists of the invention) to mobilize calcium. For example, | diabetic retinopathy, diabetic nephropathy, kidney disease (e.g., renal failure, |
| | | the FLPR assay may be used to measure influx of calcium. Cells normally have very low | nephropathy and/or other diseases and disorders as described in the “Renal |
| | | concentrations of cytosolic calcium compared to much higher extracellular calcium. | Disorders” section below), diabetic neuropathy, nerve disease and nerve |
| | | Extracellular factors can cause an influx of calcium, leading to activation of calcium | damage (e.g., due to diabetic neuropathy), blood vessel blockage, heart |
| | | responsive signaling pathways and alterations in cell functions. Exemplary assays that | disease, stroke, impotence (e.g., due to diabetic neuropathy or blood vessel |
| | | may be used or routinely modified to measure calcium flux by polypeptides of the | blockage), seizures, mental confusion, drowsiness, nonketotic hyperglycemic- |
| | | invention (including antibodies and agonists or antagonists of the invention) include assays | hyperosmolar coma, cardiovascular disease (e.g., heart disease, |
| | | disclosed in: Satin LS, et al., Endocrinology, 136(10): 4589-601 (1995); Mogami H, et al., | atherosclerosis, microvascular disease, hypertension, stroke, and other |
| | | Endocrinology, 136(7): 2960-6 (1995); Richardson SB, et al., Biochem J, 288 (Pt 3): 847-51 | diseases and disorders as described in the “Cardiovascular Disorders” section |
| | | (1992); and, Meats, JE, et al., Cell Calcium 1989 Nov-Dec; 10(8): 535-41 (1989), the | below), dyslipidemia, endocrine disorders (as described in the “Endocrine |
| | | contents of each of which is herein incorporated by reference in its entirety. Pancreatic | Disorders” section below), neuropathy, vision impairment (e.g., diabetic |
| | | cells that may be used according to these assays are publicly available (e.g., through the | retinopathy and blindness), ulcers and impaired wound healing, and infection |
| | | ATCC ™) and/or may be routinely generated. Exemplary pancreatic cells that may be used | (e.g., infectious diseases and disorders as described in the “Infectious |
| | | according to these assays include HITT15 Cells. HITT15 are an adherent epithelial cell | Diseases” section below, especially of the urinary tract and skin), carpal tunnel |
| | | line established from Syrian hamster islet cells transformed with SV40. These cells express | syndrome and Dupuytren's contracture). An additional highly preferred |
| | | glucagon, somatostatin, and glucocorticoid receptors. The cells secrete insulin, which is | indication is obesity and/or complications associated with obesity. Additional |
| | | stimulated by glucose and glucagon and suppressed by somatostatin or glucocorticoids. | highly preferred indications include weight loss or alternatively, weight gain. |
| | | ATTC# CRL-1777 Refs: Lord and Ashcroft. Biochem. J. 219: 547-551; Santerre et al. | Aditional highly preferred indications are complications associated with |
| | | Proc. Natl. Acad. Sci. USA 78: 4339-4343, 1981. | insulin resistance. |
| 96 | Stimulation of insulin | Assays for measuring secretion of insulin are well-known in the art and may be used or | A highly preferred indication is diabetes mellitus. An additional |
| | secretion from pancreatic beta | routinely modified to assess the ability of polypeptides of the invention (including | highly preferred indication is a complication associated with diabetes (e.g., |
| | cells. | antibodies and agonists or antagonists of the invention) to stimulate insulin secretion. For | diabetic retinopathy, diabetic nephropathy, kidney disease (e.g., renal failure, |
| | | example, insulin secretion is measured by FMAT using anti-rat insulin antibodies. Insulin | nephropathy and/or other diseases and disorders as described in the “Renal |
| | | secretion from pancreatic beta cells is upregulated by glucose and also by certain | Disorders” section below), diabetic neuropathy, nerve disease and nerve |
| | | proteins/peptides, and disregulation is a key component in diabetes. Exemplary assays that | damage (e.g., due to diabetic neuropathy), blood vessel blockage, heart |
| | | may be used or routinely modified to test for stimulation of insulin secretion (from | disease, stroke, impotence (e.g., due to diabetic neuropathy or blood vessel |
| | | pancreatic cells) by polypeptides of the invention (including antibodies and agonists or | blockage), seizures, mental confusion, drowsiness, nonketotic hyperglycemic- |
| | | antagonists of the invention) include assays disclosed in: Ahren, B., et al., Am J Physiol, | hyperosmolar coma, cardiovascular disease (e.g., heart disease, |
| | | 277(4 Pt 2): R959-66 (1999); Li, M., et al., Endocrinology, 138(9): 3735-40 (1997); Kim, K. H., | atherosclerosis, microvascular disease, hypertension, stroke, and other |
| | | et al., FEBS Lett, 377(2): 237-9 (1995); and, Miraglia S et. al., Journal of | diseases and disorders as described in the “Cardiovascular Disorders” section |
| | | Biomolecular Screening, 4: 193-204 (1999), the contents of each of which is herein | below), dyslipidemia, endocrine disorders (as described in the “Endocrine |
| | | incorporated by reference in its entirety. Pancreatic cells that may be used according to | Disorders” section below), neuropathy, vision impairment (e.g., diabetic |
| | | these assays are publicly available (e.g., through the ATCC ™) and/or may be routinely | retinopathy and blindness), ulcers and impaired wound healing, and infection |
| | | generated. Exemplary pancreatic cells that may be used according to these assays include | (e.g., infectious diseases and disorders as described in the “Infectious |
| | | rat INS-1 cells. INS-1 cells are a semi-adherent cell line established from cells isolated | Diseases” section below, especially of the urinary tract and skin), carpal tunnel |
| | | from an X-ray induced rat transplantable insulinoma. These cells retain characteristics | syndrome and Dupuytren's contracture). An additional highly preferred |
| | | typical of native pancreatic beta cells including glucose inducible insulin secretion, | indication is obesity and/or complications associated with obesity. Additional |
| | | References: Asfari et al. Endocrinology 1992 130: 167. | highly preferred indications include weight loss or alternatively, weight gain. |
| | | | Aditional highly preferred indications are complications associated with |
| | | | insulin resistance. |
| 97 | TNFa in Human T-cell 293T | | |

[0100] Table 1E: Polynucleotides encoding polypeptides of the present invention can be used in assays to test for one or more biological activities. One such biological activity which may be tested includes the ability of polynucleotides and polypeptides of the invention to stimulate up-regulation or down-regulation of expression of particular genes and proteins. Hence, if polynucleotides and polypeptides of the present invention exhibit activity in altering particular gene and protein expression patterns, it is likely that these polynucleotides and polypeptides of the present invention may be involved in, or capable of effecting changes in, diseases associated with the altered gene and protein expression profiles. Hence, polynucleotides, polypeptides, or antibodies of the present invention could be used to treat said associated diseases.

[0101] TaqMan® assays may be performed to assess the ability of polynucleotides (and polypeptides they encode) to alter the expression pattern of particular “target” genes. TaqMan® reactions are performed to evaluate the ability of a test agent to induce or repress expression of specific genes in different cell types. TaqMan® gene expression quantification assays (“TaqMan® assays”) are well known to, and routinely performed by, those of ordinary skill in the art. TaqMan® assays are performed in a two step reverse transcription/polymerase chain reaction (RT-PCR). In the first (RT) step, cDNA is reverse transcribed from total RNA samples using random hexamer primers. In the second (PCR) step, PCR products are synthesized from the cDNA using gene specific primers.

[0102] To quantify gene expression the Taqman® PCR reaction exploits the 5′ nuclease activity of AmpliTaq Gold® DNA Polymerase to cleave a Taqman® probe (distinct from the primers) during PCR. The Taqman® probe contains a reporter dye at the 5′-end of the probe and a quencher dye at the 3′ end of the probe. When the probe is intact, the proximity of the reporter dye to the quencher dye results in suppression of the reporter fluorescence. During PCR, if the target of interest is present, the probe specifically anneals between the forward and reverse primer sites. AmpliTaq Fold DNA Polymerase then cleaves the probe between the reporter and quencher when the probe hybridizes to the target, resulting in increased fluorescence of the reporter (see FIG. 2). Accumulation of PCR products is detected directly by monitoring the increase in fluorescence of the reporter dye.

[0103] After the probe fragments are displaced from the target, polymerization of the strand continues. The 3′-end of the probe is blocked to prevent extension of the probe during PCR. This process occurs in every cycle and does not interfere with the exponential accumulation of product. The increase in fluorescence signal is detected only if the target sequence is complementary to the probe and is amplified during PCR. Because of these requirements, any nonspecific amplification is not detected.

[0104] For test sample preparation, vector controls or constructs containing the coding sequence for the gene of interest are transfected into cells, such as for example 293T cells, and supernatants collected after 48 hours. For cell treatment and RNA isolation, multiple primary human cells or human cell lines are used; such cells may include but are not limited to, Normal Human Dermal Fibroblasts, Aortic Smooth Muscle, Human Umbilical Vein Endothelial Cells, HepG2, Daudi, Jurkat, U937, Caco, and THP-1 cell lines. Cells are plated in growth media and growth is arrested by culturing without media change for 3 days, or by switching cells to low serum media and incubating overnight. Cells are treated for 1, 6, or 24 hours with either vector control supernatant or sample supernatant (or purified/partially purified protein preparations in buffer). Total RNA is isolated; for example, by using Trizol extraction or by using the Ambion RNAqueous™-4PCR RNA isolation system. Expression levels of multiple genes are analyzed using TAQMAN, and expression in the test sample is compared to control vector samples to identify genes induced or repressed. Each of the above described techniques are well known to, and routinely performed by, those of ordinary skill in the art.

[0105] Table 1E indicates particular disease classes and preferred indications for which polynucleotides, polypeptides, or antibodies of the present invention may be used in detecting, diagnosing, preventing, treating and/or ameliorating said diseases and disorders based on “target” gene expression patterns which may be up- or down-regulated by polynucleotides (and the encoded polypeptides) corresponding to each indicated cDNA Clone ID (shown in Table 1E, Column 2).

[0106] Thus, in preferred embodiments, the present invention encompasses a method of detecting, diagnosing, preventing, treating, and/or ameliorating a disease or disorder listed in the “Disease Class” and/or “Preferred Indication” columns of Table 1E; comprising administering to a patient in which such detection, diagnosis, prevention, or treatment is desired a protein, nucleic acid, or antibody of the invention (or fragment or variant thereof) in an amount effective to detect, diagnose, prevent, treat, or ameliorate the disease or disorder. The first and second columns of Table 1D.1 show the “Gene No.” and “cDNA Clone ID No.”, respectively, indicating certain nucleic acids and proteins (or antibodies against the same) of the invention (including polynucleotide, polypeptide, and antibody fragments or variants thereof) that may be used in detecting, diagnosing, preventing, treating, or ameliorating the disease(s) or disorder(s) indicated in the corresponding row in the “Disease Class” or “Preferred Indication” Columns of Table 1E.

[0107] In another embodiment, the present invention also encompasses methods of detecting, diagnosing, preventing, treating, or ameliorating a disease or disorder listed in the “Disease Class” or “Preferred Indication” Columns of Table 1E; comprising administering to a patient combinations of the proteins, nucleic acids, or antibodies of the invention (or fragments or variants thereof), sharing similar indications as shown in the corresponding rows in the “Disease Class” or “Preferred Indication” Columns of Table 1E.

[0108] The “Disease Class” Column of Table 1E provides a categorized descriptive heading for diseases, disorders, and/or conditions (more fully described below) that may be detected, diagnosed, prevented, treated, or ameliorated by a protein, nucleic acid, or antibody of the invention (or fragment or variant thereof).

[0109] The “Preferred Indication” Column of Table 1E describes diseases, disorders, and/or conditions that may be detected, diagnosed, prevented, treated, or ameliorated by a protein, nucleic acid, or antibody of the invention (or fragment or variant thereof).

[0110] The “Cell Line” and “Exemplary Targets” Columns of Table 1E indicate particular cell lines and target genes, respectively, which may show altered gene expression patterns (i.e., up- or down-regulation of the indicated target gene) in Taqman assays, performed as described above, utilizing polynucleotides of the cDNA Clone ID shown in the corresponding row. Alteration of expression patterns of the indicated “Exemplary Target” genes is correlated with a particular “Disease Class” and/or “Preferred Indication” as shown in the corresponding row under the respective column headings.

[0111] The “Exemplary Accessions” Column indicates GenBank Accessions (available online through the National Center for Biotechnology Information (NCBI)) which correspond to the “Exemplary Targets” shown in the adjacent row.

[0112] The recitation of “Cancer” in the “Disease Class” Column indicates that the corresponding nucleic acid and protein, or antibody against the same, of the invention (or fragment or variant thereof) may be used for example, to detect, diagnose, prevent, treat, and/or ameliorate neoplastic diseases and/or disorders (e.g., leukemias, cancers, etc., as described below under “Hyperproliferative Disorders”).

[0113] The recitation of “Immune” in the “Disease Class” column indicates that the corresponding nucleic acid and protein, or antibody against the same, of the invention (or fragment or variant thereof), may be used for example, to detect, diagnose, prevent, treat, and/or ameliorate diseases and/or disorders relating to neoplastic diseases (e.g., as described below under “Hyperproliferative Disorders”), blood disorders (e.g., as described below under “Immune Activity” “Cardiovascular Disorders” and/or “Blood-Related Disorders”), and infections (e.g., as described below under “Infectious Disease”).

[0114] The recitation of “Angiogenesis” in the “Disease Class” column indicates that the corresponding nucleic acid and protein, or antibody against the same, of the invention (or fragment or variant thereof), may be used for example, to detect, diagnose, treat, prevent, and/or ameliorate diseases and/or disorders relating to neoplastic diseases (e.g., as described below under “Hyperproliferative Disorders”), diseases and/or disorders of the cardiovascular system (e.g., as described below under “Cardiovascular Disorders”), diseases and/or disorders involving cellular and genetic abnormalities (e.g., as described below under “Diseases at the Cellular Level”), diseases and/or disorders involving angiogenesis (e.g., as described below under “Anti-Angiogenesis Activity”), to promote or inhibit cell or tissue regeneration (e.g., as described below under “Regeneration”), or to promote wound healing (e.g., as described below under “Wound Healing and Epithelial Cell Proliferation”).

[0115] The recitation of “Diabetes” in the “Disease Class” column indicates that the corresponding nucleic acid and protein, or antibody against the same, of the invention (or fragment or variant thereof), may be used for example, to detect, diagnose, treat, prevent, and/or ameliorate diabetes (including diabetes mellitus types I and II), as well as diseases and/or disorders associated with, or consequential to, diabetes (e.g. as described below under “Endocrine Disorders,” “Renal Disorders,” and “Gastrointestinal Disorders”).

TABLE 1E

| Gene | cDNA | Disease | | | Exemplary | Exemplary |
|---|---|---|---|---|---|---|
| No. | Clone ID | Class | Preferred Indications | Cell Line | Targets | Accessions |
| 55 | HFCCQ50 | Immune | Highly preferred indications include immunological disorders such as described herein under the heading “Immune Activity” | TF-1 | CD40 | gb\|AJ300189\|HSA30018 |
| | | | and/or “Blood-Related Disorders” (particularly including, but not limited to, immune disorders involving erythrocytes). Highly | | CD69 | gb\|Z22576\|HSCD69GNA |
| | | | preferred embodiments of the invention include methods of preventing, detecting, diagnosing, treating and/or ameliorating disorders | | | |
| | | | of the immune system (particularly including, but not limited to, immune disorders involving erythrocytes). (The TF-1 cell line is | | | |
| | | | a human erythroblast cell line available through the ATCC as cell line number CRL-2003). | | | |
| 55 | HFCCQ50 | Immune | Highly preferred indications include immunological disorders such as described herein under the heading “Immune Activity” | U937 | ICAM | gb\|X06990\|HSICAM1 |
| | | | and/or “Blood-Related Disorders” (particularly including, but not limited to, immune disorders involving monocytes). Highly | | IRF1 | gb\|X14454\|HSIRF1 |
| | | | preferred embodiments of the invention include methods of preventing, detecting, diagnosing, treating and/or ameliorating | | LTBR | gb\|AK027080\|AK027080 |
| | | | disorders of the immune system (particularly including, but not limited to, immune disorders involving monocytes). (The U937 cell | | | |
| | | | line is a human monocyte cell line available through the ATCC as cell line number CRL-1593.2). | | | |
| 148 | HSDSB09 | Immune | Highly preferred indications include immunological disorders such as described herein under the heading “Immune Activity” | AOSMC | CCR3 | gb\|AB023887\|AB023887 |
| | | | and/or “Blood-Related Disorders” (particularly including, but not limited to, immune disorders involving muscle tissues and the | | CCR4 | gb\|AB023888\|AB023888 |
| | | | cardiovascular system (e.g. heart, lungs, circulatory system)). Highly preferred embodiments of the invention include methods of | | CD25 | gb\|X03137\|HSIL2RG7 |
| | | | preventing, detecting, diagnosing, treating and/or ameliorating disorders of the immune system (particularly including, but not limited | | CD30 | |
| | | | to, immune disorders involving muscle tissue or the cardiovascular system). (AOSMC cells are human aortic smooth | | CD40 | gb\|AJ300189\|HSA30018 |
| | | | muscle cells). | | CTLA4 | gb\|AF316875\|AF316875 |
| | | | | | IL5 | gb\|X12705\|HSBCDFIA |
| | | | | | Rag1 | gb\|M29474\|HUMRAG1 |
| | | | | | VCAM | gb\|A30922\|A30922 |
| 148 | HSDSB09 | Immune | Highly preferred indications include immunological disorders such as described herein under the heading “Immune Activity” | Caco-2 | c-maf | gb\|AF055377\|AF055377 |
| | | | and/or “Blood-Related Disorders” (particularly including, but not limited to, immune disorders involving the cells of the | | GATA3 | gb\|X55037\|HSGATA3 |
| | | | gastrointestinal tract). Highly preferred embodiments of the invention include methods of preventing, detecting, diagnosing, treating | | ICAM | gb\|X06990\|HSICAM1 |
| | | | and/or ameliorating disorders of the immune system (particularly including, but not limited to, immune disorders involving cells | | Rag1 | gb\|M29474\|HUMRAG1 |
| | | | of the gastrointestinal tract). (The Caco-2 cell line is a human colorectal adenocarcinoma cell line available through the | | | |
| | | | ATCC as cell line number HTB-37). | | | |
| 148 | HSDSB09 | Immune | Highly preferred indications include immunological disorders such as described herein under the heading “Immune Activity” | Daudi | TNF | gb\|AJ270944\|HSA27094 |
| | | | and/or “Blood-Related Disorders” (particularly including, but not limited to, immune disorders involving the B-cells). Highly | | | |
| | | | preferred embodiments of the invention include methods of preventing, detecting, diagnosing, treating and/or ameliorating disorders | | | |
| | | | of the immune system (particularly including, but not limited to, immune disorders involving B-cells). (The Daudi cell line is a | | | |
| | | | human B lymphoblast cell line available through the ATCC as cell line number CCL-213). | | | |
| 148 | HSDSB09 | Immune | Highly preferred indications include immunological disorders such as described herein under the heading “Immune Activity” | H9 | CIS3 | gb\|AB006967\|AB006967 |
| | | | and/or “Blood-Related Disorders” (particularly including, but not limited to, immune disorders involving the T-cells). Highly | | Rag1 | gb\|M29474\|HUMRAG1 |
| | | | preferred embodiments of the invention include methods of preventing, detecting, diagnosing, treating and/or ameliorating disorders | | | |
| | | | of the immune system (particularly including, but not limited to, immune disorders involving T-cells). (The H9 cell line is a human | | | |
| | | | T lymphocyte cell line available through the ATCC as cell line number HTB-176). | | | |
| 148 | HSDSB09 | Immune | Highly preferred indications include immunological disorders such as described herein under the heading “Immune Activity” | HEK293 | CCR3 | gb\|AB023887\|AB023887 |
| | | | and/or “Blood-Related Disorders” (particularly including, but not limited to, immune disorders involving epithelial cells or the | | CCR4 | gb\|AB023888\|AB023888 |
| | | | renal system). Highly preferred embodiments of the invention include methods of preventing, detecting, diagnosing, treating and/or | | CD25 | gb\|X03137\|HSIL2RG7 |
| | | | ameliorating disorders of the immune system (particularly including, but not limited to, immune disorders involving epithelial | | CD30 | |
| | | | cells or the renal system). (The 293 cell line is a human embryonal kidney epithelial cell line available through the ATCC as cell | | CD40 | gb\|AJ300189\|HSA30018 |
| | | | line number CRL-1573). | | CTLA4 | gb\|AF316875\|AF316875 |
| | | | | | GATA3 | gb\|X55037\|HSGATA3 |
| | | | | | Rag1 | gb\|M29474\|HUMRAG1 |
| | | | | | TNF | gb\|AJ270944\|HSA27094 |
| | | | | | VCAM | gb\|A30922\|A30922 |
| 148 | HSDSB09 | Immune | Highly preferred indications include immunological disorders such as described herein under the heading “Immune Activity” | HUVEC | CD40 | gb\|AJ300189\|HSA30018 |
| | | | and/or “Blood-Related Disorders” (particularly including, but not limited to, immune disorders involving endothelial cells). Highly | | ICAM | gb\|X06990\|HSICAM1 |
| | | | preferred embodiments of the invention include methods of preventing, detecting, diagnosing, treating and/or ameliorating | | IL10 | gb\|AF055467\|AF055467 |
| | | | disorders of the immune system (particularly including, but not limited to, immune disorders involving endothelial cells). (HUVEC | | Rag1 | gb\|M29474\|HUMRAG1 |
| | | | cells are human umbilical vein endothelial cells). | | Rag2 | gb\|AY011962\|AY011962 |
| | | | | | TNF | gb\|AJ270944\|HSA27094 |
| 148 | HSDSB09 | Immune | Highly preferred indications include immunological disorders such as described herein under the heading “Immune Activity” | Jurkat | CD69 | gb\|Z22576\|HSCD69GNA |
| | | | and/or “Blood-Related Disorders” (particularly including, but not limited to, immune disorders involving T-cells). Highly | | IL5 | gb\|X12705\|HSBCDFIA |
| | | | preferred embodiments of the invention include methods of preventing, detecting, diagnosing, treating and/or ameliorating | | Rantes | gb\|AF043341\|AF043341 |
| | | | disorders of the immune system (particularly including, but not limited to, immune disorders involving T-cells). (The Jurkat cell | | TNF | gb\|AJ270944\|HSA27094 |
| | | | line is a human T lymphocyte cell line available through the ATCC as cell line number TIB-152). | | | |
| 148 | HSDSB09 | Immune | Highly preferred indications include immunological disorders such as described herein under the heading “Immune Activity” and/or | Liver | CD25 | gb\|X03137\|HSIL2RG7 |
| | | | “Blood-Related Disorders” (particularly including, but not limited to, immune disorders involving cells of the hepatic system). | | | |
| | | | Highly preferred embodiments of the invention include methods of preventing, detecting, diagnosing, treating and/or ameliorating | | | |
| | | | disorders of the immune system (particularly including, but not limited to, immune disorders involving cells of the hepatic system). | | | |
| 148 | HSDSB09 | Immune | Highly preferred indications include immunological disorders such as described herein under the heading “Immune Activity” | Molt4 | CD28 | gb\|AF222342\|AF222342 |
| | | | and/or “Blood-Related Disorders” (particularly including, but not limited to, immune disorders involving T-cells). Highly preferred | | | |
| | | | embodiments of the invention include methods of preventing, detecting, diagnosing, treating and/or ameliorating disorders of | | | |
| | | | the immune system (particularly including, but not limited to, immune disorders involving T-cells). (The Molt-4 cell line is a human | | | |
| | | | T-cell line available through the ATCC (#CRL-1582). | | | |
| 148 | HSDSB09 | Immune | Highly preferred indications include immunological disorders such as described herein under the heading “Immune Activity” and/or | NHDF | CD28 | gb\|AF222342\|AF222342 |
| | | | “Blood-Related Disorders” (particularly including, but not limited to, immune disorders involving the skin). Highly preferred | | CD40 | gb\|AJ300189\|HSA30018 |
| | | | embodiments of the invention include methods of preventing, detecting, diagnosing, treating and/or ameliorating disorders of the | | Il6 | gb\|X04403\|HS26KDAR |
| | | | immune system (particularly including, but not limited to, immune disorders involving the skin). (NHDF cells are normal | | | |
| | | | human dermal fibroblasts). | | | |
| 148 | HSDSB09 | Immune | Highly preferred indications include immunological disorders such as described herein under the heading “Immune Activity” and/or | SK-N-MC | c-maf | gb\|AF055377\|AF055377 |
| | | | “Blood-Related Disorders” (particularly including, but not limited to, immune disorders involving the central nervous system). Highly | neuro- | CIS3 | gb\|AB006967\|AB006967 |
| | | | preferred embodiments of the invention include methods of preventing, detecting, diagnosing, treating and/or ameliorating disorders of the | blastoma | TNF | gb\|AJ270944\|HSA27094 |
| | | | immune system (particularly including, but not limited to, immune disorders involving the central nervous sytem). (The SK-N-MC | | | |
| | | | neuroblastoma cell line is a cell line derived from human brain tissue and is available through the ATCC as cell line number HTB-10). | | | |
| 148 | HSDSB09 | Immune | Highly preferred indications include immunological disorders such as described herein under the heading “Immune Activity” and/or | SUPT | TNF | gb\|AJ270944\|HSA27O94 |
| | | | “Blood-Related Disorders” (particularly including, but not limited to, immune disorders involving T-cells). Highly preferred embodi- | | VCAM | gb\|A30922\|A30922 |
| | | | ments of the invention include methods of preventing, detecting, diagnosing, treating and/or ameliorating disorders of the immune | | | |
| | | | system (particularly including, but not limited to, immune disorders involving T-cells). (The SUPT cell line is a human T-cell line). | | | |
| 148 | HSDSB09 | Immune | Highly preferred indications include immunological disorders such as described herein under the heading “Immune Activity” and/ | THP1 | CCR3 | gb\|AB023887\|AB023887 |
| | | | or “Blood-Related Disorders” (particularly including, but not limited to, immune disorders involving monocytes). Highly preferred | | CD40 | gb\|AJ300189\|HSA30018 |
| | | | embodiments of the invention include methods of preventing, detecting, diagnosing, treating and/or ameliorating disorders of the | | GATA3 | gb\|X55037\|HSGATA3 |
| | | | immune system (particularly including, but not limited to, immune disorders involving monocytes). (The THP1 cell line is a human | | ICAM | gb\|X06990\|HSICAM1 |
| | | | monocyte cell line available through the ATCC as cell line number TIB-202). | | IL5 | gb\|X12705\|HSBCDFIA |
| | | | | | Rag2 | gb\|AY011962\|AY011962 |
| | | | | | VCAM | gb\|A30922\|A30922 |
| 148 | HSDSB09 | Immune | Highly preferred indications include immunological disorders such as described herein under the heading “Immune Activity” and/ | U937 | IL1B | gb\|X02532\|HSIL1BR |
| | | | or “Blood-Related Disorders” (particularly including, but not limited to, immune disorders involving monocytes). Highly preferred | | | |
| | | | embodiments of the invention include methods of preventing, detecting, diagnosing, treating and/or ameliorating disorders of | | | |
| | | | the immune system (particularly including, but not limited to, immune disorders involving monocytes). (The U937 cell line is a | | | |
| | | | human monocyte cell line available through the ATCC as cell line number CRL-1593.2). | | | |
| 182 | HUKBT29 | Immune | Highly preferred indications include immunological disorders such as described herein under the heading “Immune Activity” | U937 | CD69 | gb\|Z22576\|HSCD69GNA |
| | | | and/or “Blood-Related Disorders” (particularly including, but not limited to, immune disorders involving monocytes). Highly | | | |
| | | | preferred embodiments of the invention include methods of preventing, detecting, diagnosing, treating and/or ameliorating disorders | | | |
| | | | of the immune system (particularly including, but not limited to, immune disorders involving monocytes). (The U937 cell line is | | | |
| | | | a human monocyte cell line available through the ATCC (#CRL-1593.2)). | | | |

[0116] Table 2 further characterizes certain encoded polypeptides of the invention, by providing the results of comparisons to protein and protein family databases. The first column provides a unique clone identifier, “Clone ID NO:”, corresponding to a cDNA clone disclosed in Table 1A and/or Table 1B. The second column provides the unique contig identifier, “Contig ID:” which allows correlation with the information in Table 1B. The third column provides the sequence identifier, “SEQ ID NO:”, for the contig polynucleotide sequences. The fourth column provides the analysis method by which the homology/identity disclosed in the Table was determined. The fifth column provides a description of the PFAM/NR hit identified by each analysis. Column six provides the accession number of the PFAM/NR hit disclosed in the fifth column. Column seven, score/percent identity, provides a quality score or the percent identity, of the hit disclosed in column five. Comparisons were made between polypeptides encoded by polynucleotides of the invention and a non-redundant protein database (herein referred to as “NR”), or a database of protein families (herein referred to as “PFAM”), as described below.

[0117] The NR database, which comprises the NBRF PIR database, the NCBI GenPept database, and the SIB SwissProt and TrEMBL databases, was made non-redundant using the computer program nrdb2 (Warren Gish, Washington University in Saint Louis). Each of the polynucleotides shown in Table 1B, column 3 (e.g., SEQ ID NO:X or the ‘Query’ sequence) was used to search against the NR database. The computer program BLASTX was used to compare a 6-frame translation of the Query sequence to the NR database (for information about the BLASTX algorithm please see Altshul et al., J. Mol. Biol. 215:403-410 (1990), and Gish and States, Nat. Genet. 3:266-272 (1993). A description of the sequence that is most similar to the Query sequence (the highest scoring ‘Subject’) is shown in column five of Table 2 and the database accession number for that sequence is provided in column six. The highest scoring ‘Subject’ is reported in Table 2 if (a) the estimated probability that the match occurred by chance alone is less than 1.0e-07, and (b) the match was not to a known repetitive element. BLASTX returns alignments of short polypeptide segments of the Query and Subject sequences that share a high degree of similarity; these segments are known as High-Scoring Segment Pairs or HSPs. Table 2 reports the degree of similarity between the Query and the Subject for each HSP as a percent identity in Column 7. The percent identity is determined by dividing the number of exact matches between the two aligned sequences in the HSP, dividing by the number of Query amino acids in the HSP and multiplying by 100. The polynucleotides of SEQ ID NO:X which encode the polypeptide sequence that generates an HSP are delineated by columns 8 and 9 of Table 2.

[0118] The PFAM database, PFAM version 2.1, (Sonnhammer, Nucl. Acids Res., 26:320-322, 1998)) consists of a series of multiple sequence alignments; one alignment for each protein family. Each multiple sequence alignment is converted into a probability model called a Hidden Markov Model, or HMM, that represents the position-specific variation among the sequences that make up the multiple sequence alignment (see, e.g., Durbin, et al., Biological sequence analysis: probabilistic models of proteins and nucleic acids, Cambridge University Press, 1998 for the theory of HMMs). The program HMMER version 1.8 (Sean Eddy, Washington University in Saint Louis) was used to compare the predicted protein sequence for each Query sequence (SEQ ID NO:Y in Table 1B) to each of the HMMs derived from PFAM version 2.1. A HMM derived from PFAM version 2.1 was said to be a significant match to a polypeptide of the invention if the score returned by HMMER 1.8 was greater than 0.8 times the HMMER 1.8 score obtained with the most distantly related known member of that protein family. The description of the PFAM family which shares a significant match with a polypeptide of the invention is listed in column 5 of Table 2, and the database accession number of the PFAM hit is provided in column 6. Column 7 provides the score returned by HMMER version 1.8 for the alignment. Columns 8 and 9 delineate the polynucleotides of SEQ ID NO:X which encode the polypeptide sequence which show a significant match to a PFAM protein family.

[0119] As mentioned, columns 8 and 9 in Table 2, “ANT From” and “NT To”, delineate the polynucleotides of “SEQ ID NO:X” that encode a polypeptide having a significant match to the PFAM/NR database as disclosed in the fifth column. In one embodiment, the invention provides a protein comprising, or alternatively consisting of, a polypeptide encoded by the polynucleotides of SEQ ID NO:X delineated in columns 8 and 9 of Table 2. Also provided are polynucleotides encoding such proteins, and the complementary strand thereto.

[0120] The nucleotide sequence SEQ ID NO:X and the translated SEQ ID NO:Y are sufficiently accurate and otherwise suitable for a variety of uses well known in the art and described further below. For instance, the nucleotide sequences of SEQ ID NO:X are useful for designing nucleic acid hybridization probes that will detect nucleic acid sequences contained in SEQ ID NO:X or the cDNA contained in ATCC Deposit No:Z. These probes will also hybridize to nucleic acid molecules in biological samples, thereby enabling immediate applications in chromosome mapping, linkage analysis, tissue identification and/or typing, and a variety of forensic and diagnostic methods of the invention. Similarly, polypeptides identified from SEQ ID NO:Y may be used to generate antibodies which bind specifically to these polypeptides, or fragments thereof, and/or to the polypeptides encoded by the cDNA clones identified in, for example, Table 1A and/or 1B.

[0121] Nevertheless, DNA sequences generated by sequencing reactions can contain sequencing errors. The errors exist as misidentified nucleotides, or as insertions or deletions of nucleotides in the generated DNA sequence. The erroneously inserted or deleted nucleotides cause frame shifts in the reading frames of the predicted amino acid sequence. In these cases, the predicted amino acid sequence diverges from the actual amino acid sequence, even though the generated DNA sequence may be greater than 99.9% identical to the actual DNA sequence (for example, one base insertion or deletion in an open reading frame of over 1000 bases).

[0122] Accordingly, for those applications requiring precision in the nucleotide sequence or the amino acid sequence, the present invention provides not only the generated nucleotide sequence identified as SEQ ID NO:Y, and a predicted translated amino acid sequence identified as SEQ ID NO:Y, but also a sample of plasmid DNA containing cDNA ATCC Deposit No:Z (e.g., as set forth in columns 2 and 3 of Table 1A and/or as set forth, for example, in Table 1B, 6, and 7). The nucleotide sequence of each deposited clone can readily be determined by sequencing the deposited clone in accordance with known methods. Further, techniques known in the art can be used to verify the nucleotide sequences of SEQ ID NO:X. The predicted amino acid sequence can then be verified from such deposits. Moreover, the amino acid sequence of the protein encoded by a particular clone can also be directly determined by peptide sequencing or by expressing the protein in a suitable host cell containing the deposited human cDNA, collecting the protein, and determining its sequence.

TABLE 2

| | | | | | PFam/NR | | | |
|---|---|---|---|---|---|---|---|---|
| | | | Analysis | | Accession | Score/Percent | | |
| cDNA Clone ID | Contig ID: | SEQ ID NO: X | Method | PFam/NR Description | Number | Identity | NT From | NT To |
| H6EDX46 | 1352262 | 13 | WUblastx.64 | (Q9Y2B0) TYPE II MEMBRANE PROTEIN. | Q9Y2B0 | 100% | 229 | 774 |
| H6EDX46 | 637786 | 206 | WUblastx.64 | (Q9UHE9) ZSIG9 PROTEIN (TRANSMEMBRANE PROTEIN 4). | Q9UHE9 | 100% | 188 | 379 |
| HACBD91 | 637482 | 15 | WUblastx.64 | NADH dehydrogenase (ubiquinone) (EC 1.6.5.3) chain NDUFB4 - human | pir\|JE0383\|JE0383 | 100% | 211 | 357 |
| | | | | | | 95% | 1306 | 1368 |
| HACCI17 | 891114 | 16 | HMMER 2.1.1 | PFAM: PMP-22/EMP/MP20/Claudin family | PF00822 | 142.7 | 470 | 1003 |
| | | | WUblastx.64 | (Q8WUW3) Hypothetical 27.7 kDa protein (Fragment). | Q8WUW3 | 100% | 317 | 1114 |
| HACCI17 | 731877 | 207 | HMMER 2.1.1 | PFAM: PMP-22/EMP/MP20/Claudin family | PF00822 | 35.6 | 144 | 329 |
| | | | WUblastx.64 | (Q8WUW3) Hypothetical 27.7 kDa protein (Fragment). | Q8WUW3 | 80% | 24 | 329 |
| | | | | | | 57% | 454 | 495 |
| | | | | | | 90% | 1 | 96 |
| | | | | | | 30% | 66 | 296 |
| | | | | | | 75% | 535 | 786 |
| | | | | | | 100% | 311 | 619 |
| HAHDR32 | 635357 | 18 | WUblastx.64 | (Q9HBU9) POPEYE PROTEIN 2. | Q9HBU9 | 84% | 77 | 811 |
| HAMFC93 | 904749 | 21 | WUblastx.64 | (Q9BGQ6) HYPOTHETICAL 30.3 KDA PROTEIN. | Q9BGQ6 | 92% | 1 | 708 |
| HAMFC93 | 900586 | 208 | WUblastx.64 | (Q9BGQ6) HYPOTHETICAL 30.3 KDA PROTEIN. | Q9BGQ6 | 64% | 495 | 686 |
| | | | | | | 31% | 53 | 337 |
| | | | | | | 95% | 4 | 573 |
| | | | | | | 35% | 111 | 269 |
| HAMFC93 | 906819 | 209 | WUblastx.64 | (Q9NV26) CDNA FLJ10975 FIS, CLONE PLACE1001383, WEAKLY SIMILAR | Q9NV26 | 98% | 1430 | 1624 |
| | | | | TO ZIN | | 82% | 1001 | 1138 |
| | | | | | | 100% | 2663 | 2746 |
| HATDF29 | 845965 | 23 | WUblastx.64 | (O95803) HEPARAN SULFATE N-DEACETYLASE/N-SULFOTRANSFERASE | O95803 | 93% | 143 | 1216 |
| | | | | 3. | | | | |
| HBAFJ33 | 625916 | 24 | WUblastx.64 | (Q9GZR7) HYPOTHETICAL 96.3 KDA PROTEIN (ATP-DEPENDENT RNA | Q9GZR7 | 96% | 672 | 950 |
| | | | | HELICASE) ( | | | | |
| HBAFV19 | 843036 | 25 | WUblastx.64 | (Q9H068) HYPOTHETICAL 69.9 KDA PROTEIN. | Q9H068 | 100% | 3 | 779 |
| HBIBW67 | 553678 | 26 | WUblastx.64 | (O60448) NEURONAL THREAD PROTEIN AD7C-NTP. | O60448 | 71% | 665 | 531 |
| | | | | | | 38% | 617 | 384 |
| | | | | | | 67% | 675 | 520 |
| | | | | | | 65% | 896 | 837 |
| | | | | | | 40% | 838 | 758 |
| | | | | | | 67% | 1041 | 931 |
| | | | | | | 53% | 699 | 430 |
| | | | | | | 71% | 833 | 792 |
| | | | | | | 55% | 894 | 838 |
| | | | | | | 31% | 1077 | 871 |
| | | | | | | 46% | 611 | 423 |
| | | | | | | 42% | 835 | 743 |
| | | | | | | 31% | 701 | 372 |
| | | | | | | 59% | 530 | 465 |
| | | | | | | 38% | 532 | 404 |
| | | | | | | 50% | 1075 | 893 |
| | | | | | | 37% | 523 | 404 |
| | | | | | | 46% | 915 | 838 |
| | | | | | | 77% | 1049 | 1023 |
| | | | | | | 61% | 1042 | 785 |
| HBIMB51 | 963208 | 27 | WUblastx.64 | (Q969E3) Urocortin III (Stresscopin). | Q969E3 | 99% | 98 | 535 |
| HBIMB51 | 672711 | 210 | WUblastx.64 | (Q924A4) Urocortin III. | Q924A4 | 61% | 296 | 517 |
| | | | | | | 64% | 93 | 302 |
| HBJID05 | 1130660 | 28 | WUblastx.64 | probable ATP-binding component of ABC transporter PA4064 [imported] - | pir\|H83138\|H83138 | 81% | 912 | 1604 |
| | | | | Pseudomonas aeruginosa (strain PAO1) | | | | |
| HBJID05 | 544980 | 211 | WUblastx.64 | hypothetical protein PA4063 [imported] - Pseudomonas aeruginosa (strain PAO1) | pir\|G83138\|G83138 | 61% | 137 | 448 |
| HBJJU28 | 561723 | 29 | WUblastx.64 | (Q9H728) CDNA: FLJ21463 FIS, CLONE COL04765. | Q9H728 | 61% | 991 | 836 |
| | | | | | | 64% | 1152 | 976 |
| HBXFL29 | 842802 | 31 | WUblastx.64 | (Q8WYF7) POB1. | Q8WYF7 | 99% | 4 | 1008 |
| HCACU58 | 625923 | 32 | WUblastx.64 | (Q9NX85) CDNA FLJ20378 FIS, CLONE KAIA0536. | Q9NX85 | 69% | 548 | 820 |
| HCDBW86 | 520435 | 33 | WUblastx.64 | (Q96P03) Transient receptor potential channel 4 zeta splice variant. | Q96P03 | 100% | 630 | 589 |
| | | | | | | 100% | 463 | 371 |
| HCE3G69 | 728432 | 34 | WUblastx.64 | (Q9H0K7) HYPOTHETICAL 12.4 KDA PROTEIN (UNKNOWN) (PROTEIN | Q9H0K7 | 100% | 1294 | 1647 |
| | | | | FOR MGC: 303 | | | | |
| HCE3G69 | 494346 | 212 | WUblastx.64 | (Q9H0K7) HYPOTHETICAL 12.4 KDA PROTEIN (UNKNOWN) (PROTEIN | Q9H0K7 | 100% | 1295 | 1648 |
| | | | | FOR MGC: 303 | | | | |
| HCEEA88 | 634967 | 35 | WUblastx.64 | (P57054) DOWN SYNDROME CRITICAL REGION PROTEIN 5 (DOWN SYND | DSR5_HUMAN | 100% | 134 | 286 |
| | | | | | | 85% | 453 | 773 |
| HCEFB69 | 748245 | 36 | HMMER 2.1.1 | PFAM: Mitochondrial carrier proteins | PF00153 | 123.9 | 308 | 781 |
| | | | WUblastx.64 | (Q9HC61) MITOCHONDRIAL UNCOUPLING PROTEIN 5 SHORT FORM | Q9HC61 | 96% | 1093 | 1185 |
| | | | | WITH INSERTION | | 47% | 1264 | 1320 |
| | | | | | | 98% | 188 | 781 |
| HCWKC15 | 553621 | 40 | WUblastx.64 | (Q9NX85) CDNA FLJ20378 FIS, CLONE KAIA0536. | Q9NX85 | 77% | 538 | 419 |
| | | | | | | 56% | 710 | 663 |
| | | | | | | 63% | 708 | 532 |
| HDHEB60 | 499233 | 42 | WUblastx.64 | (Q9Y5Y5) PEROXISOMAL BIOGENESIS FACTOR 16. | Q9Y5Y5 | 81% | 277 | 1284 |
| HDHMA45 | 902513 | 43 | WUblastx.64 | (Q9H3S3) TRANSMEMBRANE PROTEASE, SERINE 5 (EC 3.4.21.—) (SP | TMS5_HUMAN | 99% | 175 | 1437 |
| HDHMA45 | 812764 | 213 | HMMER 2.1.1 | PFAM: Trypsin | PF00089 | 296.3 | 723 | 1415 |
| | | | WUblastx.64 | (Q9H3S3) TRANSMEMBRANE PROTEASE, SERINE 5 (EC 3.4.21.—) (SP | TMS5_HUMAN | 99% | 180 | 1442 |
| HDHMA72 | 547772 | 44 | WUblastx.64 | (Q8WVP7) Hypothetical 55.1 kDa protein. | Q8WVP7 | 28% | 3700 | 3891 |
| | | | | | | 95% | 761 | 1168 |
| | | | | | | 50% | 1019 | 1231 |
| | | | | | | 99% | 2 | 592 |
| HDPBA28 | 1062783 | 45 | WUblastx.64 | (Q9UKY2) ADIPOCYTE-DERIVED LEUCINE AMINOPEPTIDASE. | Q9UKY2 | 99% | 259 | 3081 |
| HDPBA28 | 866429 | 214 | HMMER 2.1.1 | PFAM: Peptidase family M1 | PF01433 | 613.6 | 228 | 1391 |
| | | | WUblastx.64 | (Q9UKY2) ADIPOCYTE-DERIVED LEUCINE AMINOPEPTIDASE. | Q9UKY2 | 99% | 69 | 2891 |
| HDPCY37 | 837699 | 47 | HMMER 2.1.1 | PFAM: Glycosyl hydrolase family 47 | PF01532 | 627.5 | 199 | 1521 |
| | | | WUblastx.64 | (Q9H886) CDNA FLJ13869 FIS, CLONE THYRO1001287, WEAKLY SIMILAR | Q9H886 | 99% | 76 | 1809 |
| | | | | TO MAN | | | | |
| HDPCY37 | 604114 | 215 | HMMER 2.1.1 | PFAM: Glycosyl hydrolase family 47 | PF01532 | 324 | 199 | 834 |
| | | | WUblastx.64 | (Q9H886) CDNA FLJ13869 FIS, CLONE THYRO1001287, WEAKLY SIMILAR | Q9H886 | 97% | 76 | 840 |
| | | | | TO MAN | | 99% | 813 | 1808 |
| HDPND46 | 637586 | 49 | WUblastx.64 | (Q9BR26) DJ257E24.3 (NOVEL PROTEIN) (FRAGMENT). | Q9BR26 | 81% | 12 | 1466 |
| HDPOH06 | 683371 | 50 | HMMER 2.1.1 | PFAM: Uncharacterized membrane protein family | PF01554 | 90.8 | 255 | 596 |
| | | | WUblastx.64 | (Q96FL8) Hypothetical 61.9 kDa protein. | Q96FL8 | 99% | 18 | 977 |
| HDPSP54 | 744440 | 51 | WUblastx.64 | (BAB85063) CDNA FLJ23790 fis, clone HEP21466. | BAB85063 | 99% | 2 | 307 |
| HDPVH60 | 796865 | 52 | WUblastx.64 | (BAB55096) CDNA FLJ14508 fis, clone NT2RM1000421, w | BAB55096 | 95% | 235 | 294 |
| | | | | | | 38% | 288 | 473 |
| | | | | | | 58% | 244 | 294 |
| | | | | | | 88% | 288 | 1610 |
| | | | | | | 40% | 456 | 521 |
| | | | | | | 29% | 1215 | 1487 |
| | | | | | | 31% | 1389 | 1607 |
| | | | | | | 42% | 238 | 294 |
| | | | | | | 38% | 1607 | 1861 |
| | | | | | | 27% | 798 | 1544 |
| | | | | | | 42% | 1317 | 1478 |
| | | | | | | 24% | 1604 | 2017 |
| | | | | | | 30% | 1613 | 1903 |
| | | | | | | 25% | 1607 | 1906 |
| | | | | | | 27% | 1658 | 2032 |
| | | | | | | 86% | 1580 | 2077 |
| | | | | | | 29% | 1628 | 1903 |
| | | | | | | 35% | 1200 | 1598 |
| | | | | | | 42% | 238 | 294 |
| HDPWN93 | 992925 | 53 | WUblastx.64 | (AAH25255) Similar to hypothetical protein FLJ21347 | AAH25255 | 99% | 45 | 2450 |
| HDPWN93 | 887914 | 217 | WUblastx.64 | (AAH25255) Similar to hypothetical protein FLJ21347 | AAH25255 | 97% | 35 | 661 |
| | | | | | | 68% | 619 | 714 |
| HDPWN93 | 905983 | 218 | WUblastx.64 | (Q9H747) CDNA: FLJ21347 FIS, CLONE COL02724. | Q9H747 | 68% | 27 | 155 |
| | | | | | | 99% | 205 | 2487 |
| HDQHD03 | 1309175 | 54 | WUblastx.64 | (AAH25621) Hypothetical 137.4 kDa protein (Fragment | AAH25621 | 86% | 520 | 1263 |
| HDQHD03 | 834692 | 219 | HMMER 2.1.1 | PFAM: Cyclic nucleotide-binding domain | PF00027 | 44.3 | 709 | 870 |
| | | | WUblastx.64 | (AAH25621) Hypothetical 137.4 kDa protein (Fragment | AAH25621 | 84% | 505 | 1248 |
| HE8QV67 | 1050076 | 56 | WUblastx.64 | (BAB55430) CDNA FLJ14978 fis, clone VESEN1000122. | BAB55430 | 100% | 321 | 425 |
| | | | | | | 31% | 487 | 600 |
| | | | | | | 100% | 1 | 201 |
| | | | | | | 96% | 1403 | 1684 |
| | | | | | | 96% | 577 | 729 |
| | | | | | | 98% | 800 | 1108 |
| HE8QV67 | 1050077 | 220 | WUblastx.64 | (BAB55430) CDNA FLJ14978 fis, clone VESEN1000122. | BAB55430 | 100% | 1500 | 1988 |
| | | | | | | 86% | 3 | 206 |
| | | | | | | 30% | 109 | 246 |
| | | | | | | 30% | 1366 | 1455 |
| | | | | | | 99% | 334 | 1500 |
| HE8UB86 | 834913 | 57 | WUblastx.64 | (Q9D390) 6330503C03RIK PROTEIN. | Q9D390 | 44% | 103 | 189 |
| | | | | | | 61% | 432 | 707 |
| HE9BK23 | 675382 | 58 | HMMER 2.1.1 | PFAM: Fibrinogen beta and gamma chains, C-terminal globular domain | PF00147 | 77.2 | 762 | 959 |
| | | | WUblastx.64 | (Q9Y5C1) ANGIOPOIETIN 5. | Q9Y5C1 | 100% | 958 | 1419 |
| | | | | | | 92% | 39 | 959 |
| HEQCC55 | 1352368 | 60 | WUblastx.64 | (Q9NP84) TYPE I TRANSMENMBRANE PROTEIN PRECURSOR (TYPE I | Q9NP84 | 100% | 25 | 411 |
| | | | | TRANSMEMBRAN | | | | |
| HEQCC55 | 884824 | 221 | WUblastx.64 | (Q9NP84) TYPE I TRANSMENMBRANE PROTEIN PRECURSOR (TYPE I | Q9NP84 | 64% | 62 | 397 |
| | | | | TRANSMEMBRAN | | | | |
| HEQCC55 | 748227 | 222 | WUblastx.64 | (Q9NP84) TYPE I TRANSMENMBRANE PROTEIN PRECURSOR (TYPE I | Q9NP84 | 96% | 57 | 224 |
| | | | | TRANSMEMBRAN | | 100% | 211 | 393 |
| HESAJ10 | 526013 | 61 | WUblastx.64 | (Q8WWX9) Selenoprotein SelM. | Q8WWX9 | 96% | 566 | 841 |
| | | | | | | 95% | 405 | 545 |
| | | | | | | 64% | 541 | 582 |
| HETEU28 | 1018676 | 62 | WUblastx.64 | (Q96CP0) Similar to old astrocyte specifically induced substance. | Q96CP0 | 99% | 7 | 714 |
| HETEU28 | 882328 | 223 | WUblastx.64 | (Q96CP0) Similar to old astrocyte specifically induced substance. | Q96CP0 | 95% | 52 | 789 |
| HFABG18 | 847073 | 63 | WUblastx.64 | (Q9QZE9) TM6P1. | Q9QZE9 | 95% | 53 | 253 |
| | | | | | | 88% | 237 | 797 |
| HFAMB72 | 490697 | 64 | WUblastx.64 | (Q9Y6F6) JAW1-RELATED PROTEIN MRVI1A LONG ISOFORM. | Q9Y6F6 | 94% | 672 | 722 |
| | | | | | | 69% | 1 | 669 |
| HFCCQ50 | 579993 | 65 | HMMER 2.1.1 | PFAM: Galactosyltransferase | PF01762 | 130.8 | 365 | 1042 |
| | | | WUblastx.64 | (Q9C0J1) BETA-1,3-N-ACETYLGLUCOSAMINYLTRANSFERASE BGN-T4. | Q9C0J1 | 95% | 35 | 1102 |
| HFIIZ70 | 1043350 | 66 | WUblastx.64 | (Q8WWX9) Selenoprotein SelM. | Q8WWX9 | 93% | 833 | 919 |
| | | | | | | 86% | 24 | 212 |
| | | | | | | 91% | 423 | 458 |
| | | | | | | 98% | 987 | 1145 |
| HFIIZ70 | 906708 | 224 | WUblastx.64 | (Q8WWX9) Selenoprotein SelM. | Q8WWX9 | 98% | 1038 | 1196 |
| | | | | | | 93% | 884 | 970 |
| | | | | | | 98% | 74 | 241 |
| | | | | | | 91% | 474 | 509 |
| HFKET18 | 889515 | 67 | WUblastx.64 | (Q9HAD8) CDNA FLJ11786 FIS, CLONE HEMBA1006036. | Q9HAD8 | 63% | 1384 | 1485 |
| | | | | | | 54% | 1230 | 1397 |
| | | | | | | 42% | 1444 | 1533 |
| | | | | | | 66% | 1390 | 1434 |
| | | | | | | 50% | 1471 | 1533 |
| HFPCX36 | 526635 | 72 | WUblastx.64 | (Q96NR6) CDNA FLJ30278 fis, clone BRACE2002755. | Q96NR6 | 56% | 680 | 775 |
| | | | | | | 66% | 450 | 680 |
| HFPCX64 | 1309796 | 73 | WUblastx.64 | (Q9H743) CDNA: FLJ21394 FIS, CLONE COL03536. | Q9H743 | 54% | 893 | 783 |
| | | | | | | 56% | 1066 | 872 |
| HFPCX64 | 877637 | 226 | WUblastx.64 | (Q9H743) CDNA: FLJ21394 FIS, CLONE COL03536. | Q9H743 | 54% | 891 | 781 |
| | | | | | | 56% | 1064 | 870 |
| HFPCX64 | 638851 | 227 | WUblastx.64 | (Q9H743) CDNA: FLJ21394 FIS, CLONE COL03536. | Q9H743 | 54% | 970 | 860 |
| | | | | | | 56% | 1143 | 949 |
| HFPCX64 | 514187 | 228 | WUblastx.64 | (Q9H728) CDNA: FLJ21463 FIS, CLONE COL04765. | Q9H728 | 57% | 969 | 850 |
| | | | | | | 52% | 1142 | 948 |
| HFTBM50 | 545012 | 74 | Wublastx.64 | (Q9H8P0) CDNA FLJ13352 FIS, CLONE OVARC1002165, WEAKLY SIMILAR | Q9H8P0 | 100% | 23 | 229 |
| | | | | TO 3-O | | 91% | 198 | 524 |
| HFXJU68 | 1352218 | 76 | WUblastx.64 | (Q9NVF4) CDNA FLJ10770 FIS, CLONE NT2RP4000159. | Q9NVF4 | 97% | 566 | 700 |
| | | | | | | 100% | 369 | 560 |
| HFXJU68 | 570855 | 229 | WUblastx.64 | (Q9CW46) 1300006N24RIK PROTEIN (FRAGMENT). | Q9CW46 | 51% | 9 | 599 |
| HGBIB74 | 837220 | 77 | WUblastx.64 | hypothetical protein ZK858.6 - Caenorhabditis elegans | pir\|T28058\|T28058 | 50% | 1387 | 1494 |
| | | | | | | 51% | 2 | 439 |
| | | | | | | 65% | 482 | 730 |
| | | | | | | 62% | 723 | 1403 |
| HGBIB74 | 838602 | 230 | WUblastx.64 | (Q9V3N6) BG: DS00797.1 PROTEIN. | Q9V3N6 | 65% | 736 | 1257 |
| | | | | | | 82% | 537 | 740 |
| | | | | | | 81% | 1251 | 1505 |
| | | | | | | 27% | 223 | 537 |
| | | | | | | 57% | 61 | 474 |
| HGBIB74 | 899864 | 231 | WUblastx.64 | (Q9V3N6) BG: DS00797.1 PROTEIN. | Q9V3N6 | 71% | 12 | 950 |
| HHENK42 | 493724 | 79 | WUblastx.64 | (AAK55521) PRO0764. | AAK55521 | 54% | 644 | 441 |
| HHEPM33 | 877639 | 80 | WUblastx.64 | (Q96BH1) Ring finger protein 25. | Q96BH1 | 97% | 10 | 1230 |
| | | | | | | 100% | 1185 | 1373 |
| HHGDW43 | 554613 | 83 | WUblastx.64 | (Q9P1J1) PRO1546. | Q9P1J1 | 59% | 707 | 787 |
| | | | | | | 52% | 774 | 887 |
| HJABX32 | 487807 | 86 | WUblastx.64 | (O70277) RING FINGER PROTEIN. | O70277 | 98% | 463 | 612 |
| | | | | | | 45% | 198 | 449 |
| | | | | | | 35% | 75 | 440 |
| | | | | | | 37% | 339 | 458 |
| | | | | | | 50% | 25 | 72 |
| | | | | | | 35% | 463 | 588 |
| | | | | | | 34% | 463 | 582 |
| | | | | | | 38% | 523 | 600 |
| | | | | | | 31% | 108 | 476 |
| | | | | | | 84% | 3 | 458 |
| HJBCU04 | 877643 | 87 | WUblastx.64 | (Q9Y3P8) SIT PROTEIN PRECURSOR. | Q9Y3P8 | 100% | 36 | 623 |
| HKACB56 | 554616 | 91 | HMMER 2.1.1 | PFAM: Kazal-type serine protease inhibitor domain | PF00050 | 76.3 | 114 | 266 |
| | | | WUblastx.64 | (P01001) ACROSIN INHIBITORS IIA AND IIB (BUSI-II). | IAC2_BOVIN | 82% | 96 | 266 |
| HKACM93 | 1352383 | 92 | blastx.14 | aqualysin (EC 3.4.21.—) I precursor - Thermus aquaticus | pir\|A35742\|A35742 | 40% | 884 | 1039 |
| | | | | | | 41% | 1097 | 1276 |
| | | | | | | 30% | 1274 | 1468 |
| | | | | | | 50% | 746 | 823 |
| | | | | | | 34% | 548 | 670 |
| | | | | | | 53% | 425 | 469 |
| | | | | | | 58% | 2201 | 2236 |
| HKACM93 | 907085 | 233 | WUblastx.64 | aqualysin (EC 3.4.21.—) I precursor - Thermus aquaticus | pir\|A35742\|A35742 | 42% | 937 | 1071 |
| | | | | | | 35% | 521 | 919 |
| HKACM93 | 906150 | 235 | WUblastx.64 | (P80146) EXTRACELLULAR SERINE PROTEINASE PRECURSOR (EC 3.4. | SEPR_THESR | 39% | 40 | 603 |
| HKADQ91 | 604123 | 93 | WUblastx.64 | (Q9NWC5) HYPOTHETICAL 31.7 KDA PROTEIN. | Q9NWC5 | 100% | 229 | 1053 |
| HKAEG43 | 889521 | 94 | WUblastx.64 | (Q9NRD1) F-BOX PROTEIN FBG2. | Q9NRD1 | 95% | 204 | 1082 |
| HKAEG43 | 753273 | 236 | WUblastx.64 | (Q9NRD1) F-BOX PROTEIN FBG2. | Q9NRD1 | 63% | 193 | 576 |
| | | | | | | 100% | 453 | 1070 |
| HKDBF34 | 833065 | 95 | WUblastx.64 | (Q9HBJ8) KIDNEY-SPECIFIC MEMBRANE PROTEIN NX-17. | Q9HBJ8 | 88% | 69 | 734 |
| HKDBF34 | 587268 | 237 | WUblastx.64 | (Q9HBJ8) KIDNEY-SPECIFIC MEMBRANE PROTEIN NX-17. | Q9HBJ8 | 100% | 18 | 257 |
| | | | | | | 80% | 239 | 682 |
| HKISB57 | 625956 | 96 | WUblastx.64 | (Q8WWW1) Smoothelin-B3. | Q8WWW1 | 28% | 262 | 582 |
| | | | | | | 100% | 201 | 1013 |
| | | | | | | 98% | 1107 | 1256 |
| | | | | | | 27% | 271 | 480 |
| | | | | | | 26% | 532 | 966 |
| | | | | | | 44% | 954 | 1052 |
| HKIYP40 | 580845 | 97 | WUblastx.64 | (Q9H7S6) CDNA FLJ14310 FIS, CLONE PLACE3000271. | Q9H7S6 | 47% | 468 | 295 |
| | | | | | | 61% | 1098 | 1036 |
| | | | | | | 77% | 1215 | 1189 |
| HLDOW79 | 847396 | 100 | WUblastx.64 | (AAH24441) Hypothetical 37.8 kDa protein. | AAH24441 | 83% | 10 | 699 |
| HLJBJ61 | 1019012 | 101 | WUblastx.64 | deoxyhypusine synthase (EC 1.1.1.249) [validated] - human | pir\|S68692\|S68692 | 93% | 805 | 1047 |
| HLQDH79 | 588446 | 102 | WUblastx.64 | (Q9HBZ6) HT005 PROTEIN. | Q9HBZ6 | 100% | 404 | 556 |
| HLTHG37 | 787530 | 103 | WUblastx.64 | (AAH01258) N-acetylglucosamine-phosphate mutase. | AAH01258 | 100% | 960 | 1070 |
| | | | | | | 93% | 2 | 955 |
| HLTHG37 | 743169 | 239 | WUblastx.64 | (Q9NTT5) DJ202D23.2 (NOVEL PROTEIN) (FRAGMENT). | Q9NTT5 | 100% | 640 | 335 |
| HLWAE11 | 783071 | 104 | HMMER 2.1.1 | PFAM: C1q domain | PF00386 | 44.4 | 403 | 789 |
| | | | WUblastx.64 | (Q9BXI9) COMPLEMENT-C1Q TUMOR NECROSIS FACTOR-RELATED | Q9BXI9 | 99% | 28 | 861 |
| | | | | PROTEIN. | | | | |
| HLWAY54 | 658702 | 105 | WUblastx.64 | (Q9BY87) PROACROSIN BINDING PROTEIN SP32 PRECURSOR. | Q9BY87 | 99% | 38 | 1006 |
| | | | | | | 79% | 997 | 1326 |
| | | | | | | 100% | 1448 | 1663 |
| | | | | | | 42% | 563 | 643 |
| | | | | | | 23% | 1445 | 1594 |
| | | | | | | 37% | 1260 | 1331 |
| | | | | | | 90% | 1251 | 1475 |
| HLYAZ61 | 1352163 | 108 | WUblastx.64 | (O14626) PROBABLE G PROTEIN-COUPLED RECEPTOR H963. | H963_HUMAN | 100% | 1 | 855 |
| HLYAZ61 | 423998 | 240 | HMMER 2.1.1 | PFAM: 7 transmembrane receptor (rhodopsin family) | PF00001 | 71.8 | 38 | −525 |
| | | | WUblastx.64 | (O14626) PROBABLE G PROTEIN-COUPLED RECEPTOR H963. | H963_HUMAN | 98% | 1 | 846 |
| HMADS41 | 596831 | 109 | WUblastx.64 | (AAH07725) Ceroid-lipofuscinosis, neuronal 8 (epile | AAH07725 | 92% | 186 | 449 |
| | | | | | | 100% | 427 | 1041 |
| HMADU73 | 1352177 | 110 | WUblastx.64 | (Q9EPE8) LOW-DENSITY LIPOPROTEIN RECEPTOR-RELATED PROTEIN 9. | Q9EPE8 | 87% | 491 | 2626 |
| HMADU73 | 467053 | 241 | WUblastx.64 | (Q9EPE8) LOW-DENSITY LIPOPROTEIN RECEPTOR-RELATED PROTEIN 9. | Q9EPE8 | 78% | 115 | 294 |
| HMIAL37 | 603201 | 111 | HMMER 2.1.1 | PFAM: PDZ domain (Also known as DHR or GLGF). | PF00595 | 57.7 | 127 | 327 |
| | | | WUblastx.64 | (Q9Y6N9) ANTIGEN NY-CO-38. | Q9Y6N9 | 100% | 315 | 1100 |
| | | | | | | 100% | 76 | 315 |
| | | | | | | 38% | 109 | 318 |
| | | | | | | 27% | 870 | 1061 |
| | | | | | | 35% | 765 | 998 |
| | | | | | | 62% | 1111 | 1242 |
| | | | | | | 63% | 1067 | 1132 |
| HMMAH60 | 562776 | 113 | WUblastx.64 | (Q9H728) CDNA: FLJ21463 FIS, CLONE COL04765. | Q9H728 | 52% | 675 | 538 |
| | | | | | | 53% | 820 | 665 |
| HMQDT36 | 1309723 | 114 | WUblastx.64 | (Q9D1Q6) 1110001E24RIK PROTEIN. | Q9D1Q6 | 93% | 157 | 1374 |
| HMQDT36 | 424085 | 242 | HMMER 2.1.1 | PFAM: Thioredoxin | PF00085 | 59.8 | 76 | −265 |
| | | | WUblastx.64 | (Q9D1Q6) 1110001E24RIK PROTEIN. | Q9D1Q6 | 93% | 192 | 1409 |
| HMSHS36 | 1127691 | 115 | WUblastx.64 | (O95662) POT. ORF VI (FRAGMENT). | O95662 | 83% | 781 | 350 |
| HMSHS36 | 1028961 | 243 | WUblastx.64 | (Q9H8K5) CDNA FLJ13501 FIS, CLONE PLACE1004815. | Q9H8K5 | 64% | 494 | 544 |
| | | | | | | 78% | 340 | 381 |
| | | | | | | 79% | 367 | 489 |
| HMSKC04 | 799540 | 117 | WUblastx.64 | (Q9H743) CDNA: FLJ21394 FIS, CLONE COL03536. | Q9H743 | 66% | 1341 | 1225 |
| | | | | | | 60% | 1414 | 1346 |
| | | | | | | 56% | 1244 | 1053 |
| HMTAD67 | 588447 | 118 | WUblastx.64 | (Q9N083) UNNAMED PORTEIN PRODUCT. | Q9N083 | 64% | 1171 | 947 |
| HMWFO02 | 542061 | 244 | WUblastx.64 | (Q9P1C6) PRO2738. | Q9P1C6 | 61% | 647 | 549 |
| | | | | | | 44% | 473 | 345 |
| HMWFY10 | 825421 | 120 | WUblastx.64 | (Q9NYF4) PUTATIVE ZINC FINGER PROTEIN. | Q9NYF4 | 98% | 14 | 226 |
| HMWFY10 | 490495 | 245 | WUblastx.64 | (Q9NYF4) PUTATIVE ZINC FINGER PROTEIN. | Q9NYF4 | 98% | 14 | 226 |
| HNGJP69 | 604891 | 124 | WUblastx.64 | (Q9H743) CDNA: FLJ21394 FIS, CLONE COL03536. | Q9H743 | 53% | 973 | 857 |
| | | | | | | 71% | 860 | 693 |
| HNGOI12 | 1041375 | 125 | WUblastx.64 | collagen alpha 1(VIII) chain precursor - rabbit | pir\|A34246\|A34246 | 31% | 1067 | 2092 |
| HNHOD46 | 843488 | 126 | WUblastx.64 | (O60448) NEURONAL THREAD PROTEIN AD7C-NTP. | O60448 | 76% | 334 | 552 |
| | | | | | | 56% | 646 | 921 |
| | | | | | | 56% | 645 | 713 |
| | | | | | | 52% | 844 | 894 |
| | | | | | | 73% | 331 | 498 |
| | | | | | | 59% | 353 | 625 |
| | | | | | | 50% | 828 | 917 |
| | | | | | | 70% | 721 | 792 |
| | | | | | | 48% | 781 | 915 |
| | | | | | | 50% | 558 | 791 |
| | | | | | | 35% | 401 | 595 |
| | | | | | | 31% | 283 | 552 |
| | | | | | | 50% | 379 | 462 |
| | | | | | | 61% | 486 | 839 |
| HNTBL27 | 545534 | 127 | WUblastx.64 | (Q96AA3) Putative endoplasmic reticulum multispan transmembrane prote | Q96AA3 | 98% | 243 | 500 |
| | | | | | | 33% | 13 | 168 |
| | | | | | | 40% | 646 | 711 |
| | | | | | | 96% | 13 | 261 |
| HODDW40 | 579256 | 131 | WUblastx.64 | (Q9GMP5) HYPOTHETICAL 6.6 KDA PROTEIN. | Q9GMP5 | 60% | 657 | 520 |
| HOEBZ89 | 828177 | 133 | WUblastx.64 | hypothetical protein C05G5.5 - Caenorhabditis elegans | pir\|T18967\|T18967 | 31% | 133 | 969 |
| HOEDB32 | 634994 | 134 | WUblastx.64 | (Q9Y2Y6) TADA1 PROTEIN (DKFZP564K1964 PROTEIN). | Q9Y2Y6 | 100% | 104 | 781 |
| HOEDH84 | 748236 | 135 | WUblastx.64 | (Q960D8) SD05564p. | Q960D8 | 39% | 7 | 1449 |
| HOFND85 | 847424 | 137 | HMMER 2.1.1 | PFAM: Cadherin domain | PF00028 | 256 | 905 | 1180 |
| | | | WUblastx.64 | (AAK51617) Protocadherin-beta7. | AAK51617 | 83% | 167 | 2047 |
| | | | | | | 30% | 425 | 1858 |
| HOFOC33 | 1186156 | 138 | WUblastx.64 | clusterin precursor - dog | pir\|A40018\|A40018 | 69% | 1022 | 1414 |
| | | | | | | 81% | 115 | 1086 |
| HOFOC33 | 967554 | 252 | HMMER 2.1.1 | PFAM: Clusterin | PF01093 | 236.4 | 81 | 395 |
| | | | WUblastx.64 | clusterin precursor - dog | pir\|A40018\|A40018 | 44% | 373 | 453 |
| | | | | | | 91% | 81 | 395 |
| HOFOC33 | 878690 | 253 | HMMER 2.1.1 | PFAM: Clusterin | PF01093 | 236.6 | 81 | 395 |
| | | | WUblastx.64 | clusterin precursor - dog | pir\|A40018\|A40018 | 44% | 373 | 453 |
| | | | | | | 91% | 81 | 395 |
| HOFOC33 | 905734 | 254 | HMMER 2.1.1 | PFAM: Clusterin | PF01093 | 301.2 | 76 | 432 |
| | | | WUblastx.64 | clusterin precursor - dog | pir\|A40018\|A40018 | 77% | 1023 | 1415 |
| | | | | | | 95% | 76 | 432 |
| | | | | | | 86% | 440 | 1087 |
| HOFOC33 | 902326 | 255 | WUblastx.64 | clusterin precursor - dog | pir\|A40018\|A40018 | 84% | 583 | 257 |
| HOFOC33 | 885140 | 256 | WUblastx.64 | clusterin precursor - dog | pir\|A40018\|A40018 | 77% | 839 | 36 |
| HOFOC33 | 806819 | 257 | HMMER 2.1.1 | PFAM: 60s Acidic ribosomal protein | PF00428 | 74.6 | −422 | −733 |
| | | | WUblastx.64 | acidic ribosomal protein P0, cytosolic [validated] - human | pir\|A27125\|R5HUP0 | 52% | 5 | 55 |
| | | | | | | 87% | 42 | 812 |
| HOGCK20 | 745445 | 139 | WUblastx.64 | (Q969N2) Phosphatidyl inositol glycan class T precursor (Hypothetical | Q969N2 | 99% | 378 | 1622 |
| | | | | | | 97% | 57 | 389 |
| HOGCK20 | 664499 | 258 | WUblastx.64 | (Q969N2) Phosphatidyl inositol glycan class T precursor (Hypothetical | Q969N2 | 92% | 1533 | 1616 |
| | | | | | | 97% | 68 | 382 |
| | | | | | | 44% | 51 | 125 |
| | | | | | | 50% | 52 | 81 |
| | | | | | | 99% | 371 | 1534 |
| HOGCS52 | 919898 | 140 | WUblastx.64 | (Q9NY68) CTL2 PROTEIN. | Q9NY68 | 99% | 31 | 1383 |
| HOGCS52 | 907118 | 259 | WUblastx.64 | (Q9NY68) CTL2 PROTEIN. | Q9NY68 | 99% | 36 | 1388 |
| HOGCS52 | 867965 | 260 | WUblastx.64 | (Q9H728) CDNA: FLJ21463 FIS, CLONE COL04765. | Q9H728 | 59% | 1017 | 952 |
| | | | | | | 74% | 931 | 719 |
| HOUCQ17 | 429229 | 141 | HMMER 2.1.1 | PFAM: Reprolysin family propeptide | PF01562 | 76.2 | −259 | −495 |
| | | | WUblastx.64 | (P97857) ADAM-TS 1 PRECURSOR (EC 3.4.24.—) (A DISINTEGRIN A | ATS1_MOUSE | 81% | 508 | 3408 |
| HOUDK26 | 565393 | 142 | WUblastx.64 | (Q9NUX1) CDNA FLJ11082 FIS, CLONE PLACE1005206. | Q9NUX1 | 87% | 4 | 585 |
| HPMA122 | 635491 | 146 | WUblastx.64 | (Q9CX19) 9430073N08RIK PROTEIN. | Q9CX19 | 54% | 147 | 572 |
| HPRBC80 | 829136 | 147 | HMMER 2.1.1 | PFAM: Protein phosphatase 2C | PF00481 | 336.4 | 157 | 957 |
| | | | WUblastx.64 | (Q9HAY8) SER/THR PROTEIN PHOSPHATASE TYPE 2C BETA 2 ISOFORM | Q9HAY8 | 99% | 94 | 1254 |
| | | | | (PROTEIN | | | | |
| HPRBC80 | 720095 | 268 | WUblastx.64 | (Q9HAY8) SER/THR PROTEIN PHOSPHATASE TYPE 2C BETA 2 ISOFORM | Q9HAY8 | 98% | 3 | 284 |
| | | | | (PROTEIN | | | | |
| HPRSB76 | 526310 | 148 | WUblastx.64 | (AAK33100) Aminophospholipid-transporting ATPase. | AAK33100 | 38% | 2 | 364 |
| | | | | | | 92% | 112 | 570 |
| HRACD15 | 871221 | 151 | WUblastx.64 | (AAH08084) Hypothetical 50.4 kDa protein. | AAH08084 | 98% | 1452 | 253 |
| HRACD15 | 706332 | 271 | WUblastx.64 | (AAH08084) Hypothetical 50.4 kDa protein. | AAH08084 | 82% | 1649 | 1581 |
| | | | | | | 98% | 1596 | 253 |
| HRDFD27 | 567004 | 152 | WUblastx.64 | (Q9N032) UNNAMED PROTEIN PRODUCT. | Q9N032 | 47% | 679 | 476 |
| HSAWZ41 | 580872 | 154 | WUblastx.64 | (Q9H387) PRO2550. | Q9H387 | 81% | 1386 | 1102 |
| HSDEZ20 | 1352287 | 156 | WUblastx.64 | probable voltage-activated cation channel - rat | pir\|T17101\|T17101 | 98% | 4 | 336 |
| HSDEZ20 | 704101 | 272 | WUblastx.64 | probable voltage-activated cation channel - rat | pir\|T17101\|T17101 | 89% | 9 | 335 |
| HSDJA15 | 795252 | 157 | WUblastx.64 | (Q9BZW5) TRANSMEMBRANE 6 SUPERFAMILY MEMBER 1. | Q9BZW5 | 99% | 4 | 702 |
| HSFAM31 | 552789 | 159 | WUblastx.64 | (Q9H728) CDNA: FLJ21463 FIS, CLONE COL04765. | Q9H728 | 63% | 868 | 836 |
| | | | | | | 63% | 848 | 717 |
| | | | | | | 68% | 741 | 589 |
| HSHAX21 | 612823 | 160 | WUblastx.64 | (Q9NV22) CDNA FLJ10983 FIS, CLONE PLACE1001781, WEAKLY SIMILAR | Q9NV22 | 99% | 5 | 598 |
| | | | | TO PRO | | | | |
| HSSGD52 | 1352343 | 162 | WUblastx.64 | (Q96FI8) Unknown (protein for MGC: 9160). | Q96FI8 | 100% | 344 | 2161 |
| HSSGD52 | 845666 | 274 | WUblastx.64 | (Q96FI8) Unknown (protein for MGC: 9160). | Q96FI8 | 100% | 338 | 2155 |
| HSSJC35 | 1306937 | 163 | WUblastx.64 | (Q9H400) DJ583P15.4.1 (NOVEL PROTEIN (TRANSLATION OF CDNA | Q9H400 | 81% | 62 | 946 |
| | | | | FLJ20406 (E | | | | |
| HSSJC35 | 745409 | 275 | WUblastx.64 | (Q9H400) DJ583P15.4.1 (NOVEL PROTEIN (TRANSLATION OF CDNA | Q9H400 | 100% | 55 | 939 |
| | | | | FLJ20406 (E | | | | |
| HSSJC35 | 716424 | 276 | WUblastx.64 | (Q9H400) DJ583P15.4.1 (NOVEL PROTEIN (TRANSLATION OF CDNA | Q9H400 | 76% | 161 | 949 |
| | | | | FLJ20406 (E | | 69% | 66 | 530 |
| HSYAZ50 | 902235 | 278 | WUblastx.64 | (Q96NR6) CDNA FLJ30278 fis, clone BRACE2002755. | Q96NR6 | 70% | 1945 | 2064 |
| HSYAZ50 | 882732 | 279 | WUblastx.64 | (Q9NVZ3) CDNA FLJ10420 FIS, CLONE NT2RP1000170. | Q9NVZ3 | 100% | 50 | 838 |
| HSYBG37 | 1056317 | 166 | WUblastx.64 | hypothetical protein c316G12.3 [imported] - human | pir\|T45062\|T45062 | 100% | 47 | 961 |
| HSYBG37 | 581098 | 280 | WUblastx.64 | hypothetical protein c316G12.3 [imported] - human | pir\|T45062\|T45062 | 100% | 48 | 962 |
| HSZAF47 | 1352172 | 167 | WUblastx.64 | (Q9BXJ2) COMPLEMENT-C1Q TUMOR NECROSIS FACTOR-RELATED | Q9BXJ2 | 100% | 106 | 972 |
| | | | | PROTEIN. | | | | |
| HSZAF47 | 456551 | 281 | HMMER 2.1.1 | PFAM: Collagen triple helix repeat (20 copies) | PF01391 | 54.4 | 299 | 478 |
| | | | WUblastx.64 | (Q9BXJ2) COMPLEMENT-C1Q TUMOR NECROSIS FACTOR-RELATED | Q9BXJ2 | 92% | 107 | 976 |
| | | | | PROTEIN. | | | | |
| HTADX17 | 753289 | 168 | WUblastx.64 | (Q96A28) CD84-H1 (CD2 FAMILY 10). | Q96A28 | 100% | 92 | 412 |
| | | | | | | 99% | 408 | 959 |
| HTADX17 | 457172 | 282 | WUblastx.64 | (Q96A28) CD84-H1 (CD2 FAMILY 10). | Q96A28 | 78% | 490 | 585 |
| | | | | | | 97% | 548 | 952 |
| | | | | | | 99% | 84 | 488 |
| HTEAF65 | 866485 | 169 | WUblastx.64 | (AAH25354) Similar to putative. | AAH25354 | 100% | 9 | 257 |
| HTEBI28 | 462221 | 170 | WUblastx.64 | (Q95LI0) Epididymis-specific protein ESP13.6. | Q95LI0 | 46% | 43 | 231 |
| HTEHR24 | 835894 | 171 | WUblastx.64 | (Q9HBV2) SPERM MEMBRANE ANTIGEN SMARC32. | Q9HBV2 | 76% | 84 | 959 |
| HTEHR24 | 513039 | 283 | WUblastx.64 | (Q9HBV2) SPERM MEMBRANE ANTIGEN SMARC32. | Q9HBV2 | 76% | 41 | 529 |
| | | | | | | 100% | 692 | 922 |
| | | | | | | 96% | 514 | 693 |
| HTEHU31 | 600394 | 172 | WUblastx.64 | (Q9NPE6) DJ309K20.2 (ACROSOMAL PROTEIN ACR55 (SIMILAR TO RAT | Q9NPE6 | 97% | 16 | 1056 |
| | | | | SPERM AN | | | | |
| HTEHU93 | 722254 | 173 | WUblastx.64 | (O60676) CYSTATIN-RELATED EPIDIDYMAL SPERMATOGENIC PROTEIN | CRES_HUMAN | 100% | 188 | 613 |
| HTEHU93 | 423009 | 284 | HMMER 2.1.1 | PFAM: Cystatin domain | PF00031 | 31.7 | 35 | −105 |
| | | | WUblastx.64 | (O60676) CYSTATIN-RELATED EPIDIDYMAL SPERMATOGENIC PROTEIN | CRES_HUMAN | 100% | 504 | 614 |
| | | | | | | 78% | 187 | 552 |
| HTEPG70 | 834931 | 176 | WUblastx.64 | (O75295) R27328_2. | O75295 | 93% | 23 | 268 |
| HTHBG43 | 919911 | 177 | WUblastx.64 | (Q9NX17) CDNA FLJ20489 FIS, CLONE KAT08285. | Q9NX17 | 52% | 846 | 517 |
| HTJMA95 | 706618 | 178 | HMMER 2.1.1 | PFAM: Ammonium Transporter Family | PF00909 | 62.1 | 533 | 691 |
| | | | WUblastx.64 | (Q9UBD6) RH TYPE C GLYCOPROTEIN (TUMOR-RELATED PROTEIN | Q9UBD6 | 98% | 3 | 455 |
| | | | | DRC2). | | 100% | 449 | 1069 |

RACE Protocol for Recovery of Full-Length Genes

[0123] Partial cDNA clones can be made full-length by utilizing the rapid amplification of cDNA ends (RACE) procedure described in Frohman, M. A., et al., Proc. Nat'l. Acad. Sci. USA, 85:8998-9002 (1988). A cDNA clone missing either the 5′ or 3′ end can be reconstructed to include the absent base pairs extending to the translational start or stop codon, respectively. In some cases, cDNAs are missing the start codon of translation, therefor. The following briefly describes a modification of this original 5′ RACE procedure. Poly A+ or total RNA is reverse transcribed with Superscript II (Gibco/BRL) and an antisense or complementary primer specific to the cDNA sequence. The primer is removed from the reaction with a Microcon Concentrator (Amicon). The first-strand cDNA is then tailed with dATP and terminal deoxynucleotide transferase (Gibco/BRL). Thus, an anchor sequence is produced which is needed for PCR amplification. The second strand is synthesized from the dA-tail in PCR buffer, Taq DNA polymerase (Perkin-Elmer Cetus), an oligo-dT primer containing three adjacent restriction sites (XhoI, SalI and ClaI) at the 5′ end and a primer containing just these restriction sites. This double-stranded cDNA is PCR amplified for 40 cycles with the same primers as well as a nested cDNA-specific antisense primer. The PCR products are size-separated on an ethidium bromide-agarose gel and the region of gel containing cDNA products the predicted size of missing protein-coding DNA is removed. cDNA is purified from the agarose with the Magic PCR Prep kit (PROMEGA™), restriction digested with XhoI or SalI, and ligated to a plasmid such as pBLUESCRIPT™ SKII (STRATAGENE™) at XhoI and EcoRV sites. This DNA is transformed into bacteria and the plasmid clones sequenced to identify the correct protein-coding inserts. Correct 5′ ends are confirmed by comparing this sequence with the putatively identified homologue and overlap with the partial cDNA clone. Similar methods known in the art and/or commercial kits are used to amplify and recover 3′ ends.

[0124] Several quality-controlled kits are commercially available for purchase. Similar reagents and methods to those above are supplied in kit form from Gibco/BRL for both 5′ and 3′ RACE for recovery of full-length genes. A second kit is available from CLONTECH™, which is a modification of a related technique, SLIC (single-stranded ligation to single-stranded cDNA), developed by Dumas et al., Nucleic Acids Res., 19:5227-32 (1991). The major differences in procedure are that the RNA is alkaline hydrolyzed after reverse transcription and RNA ligase is used to join a restriction site-containing anchor primer to the first-strand cDNA. This obviates the necessity for the dA-tailing reaction that results in a polyT stretch that is difficult to sequence past.

[0125] An alternative to generating 5′ or 3′ cDNA from RNA is to use cDNA library double-stranded DNA. An asymmetric PCR-amplified antisense cDNA strand is synthesized with an antisense cDNA-specific primer and a plasmid-anchored primer. These primers are removed and a symmetric PCR reaction is performed with a nested cDNA-specific antisense primer and the plasmid-anchored primer.

RNA Ligase Protocol for Generating the 5′ or 3′ End Sequences to Obtain Full Length Genes

[0126] Once a gene of interest is identified, several methods are available for the identification of the 5′ or 3′ portions of the gene that may not be present in the original cDNA plasmid. These methods include, but are not limited to, filter probing, clone enrichment using specific probes and protocols similar and identical to 5′ and 3′ RACE. While the full-length gene may be present in the library and can be identified by probing, a useful method for generating the 5′ or 3′ end is to use the existing sequence information from the original cDNA to generate the missing information. A method similar to 5′ RACE is available for generating the missing 5′ end of a desired full-length gene. (This method was published by Fromont-Racine et al., Nucleic Acids Res., 21(7):1683-1684 (1993)). Briefly, a specific RNA oligonucleotide is ligated to the 5′ ends of a population of RNA presumably containing full-length gene RNA transcript and a primer set containing a primer specific to the ligated RNA oligonucleotide and a primer specific to a known sequence of the gene of interest, is used to PCR amplify the 5′ portion of the desired full length gene which may then be sequenced and used to generate the full length gene. This method starts with total RNA isolated from the desired source, poly A RNA may be used but is not a prerequisite for this procedure. The RNA preparation may then be treated with phosphatase if necessary to eliminate 5′ phosphate groups on degraded or damaged RNA, which may interfere with the later RNA ligase step. The phosphatase if used is then inactivated and the RNA is treated with tobacco acid pyrophosphatase in order to remove the cap structure present at the 5′ ends of messenger RNAs. This reaction leaves a 5′ phosphate group at the 5′ end of the cap cleaved RNA which can then be ligated to an RNA oligonucleotide using T4 RNA ligase. This modified RNA preparation can then be used as a template for first strand cDNA synthesis using a gene specific oligonucleotide. The first strand synthesis reaction can then be used as a template for PCR amplification of the desired 5′ end using a primer specific to the ligated RNA oligonucleotide and a primer specific to the known sequence of the gene of interest. The resultant product is then sequenced and analyzed to confirm that the 5′ end sequence belongs to the relevant gene.

[0127] The present invention also relates to vectors or plasmids, which include such DNA sequences, as well as the use of the DNA sequences. The material deposited with the ATCC (e.g., as described in columns 2 and 3 of Table 1A, and/or as set forth in Table 1B, Table 6, or Table 7) is a mixture of cDNA clones derived from a variety of human tissue and cloned in either a plasmid vector or a phage vector, as described, for example, in Table 1A and Table 7. These deposits are referred to as “the deposits” herein. The tissues from which some of the clones were derived are listed in Table 7, and the vector in which the corresponding cDNA is contained is also indicated in Table 7. The deposited material includes cDNA clones corresponding to SEQ ID NO:X described, for example, in Table 1A and/or Table 1B (ATCC Deposit No:Z). A clone which is isolatable from the ATCC Deposits by use of a sequence listed as SEQ ID NO:X, may include the entire coding region of a human gene or in other cases such clone may include a substantial portion of the coding region of a human gene. Furthermore, although the sequence listing may in some instances list only a portion of the DNA sequence in a clone included in the ATCC Deposits, it is well within the ability of one skilled in the art to sequence the DNA included in a clone contained in the ATCC Deposits by use of a sequence (or portion thereof) described in, for example Tables 1A and/or Table 1B or Table 2, by procedures hereinafter further described, and others apparent to those skilled in the art.

[0128] Also provided in Table 1A and Table 7 is the name of the vector which contains the cDNA clone. Each vector is routinely used in the art. The following additional information is provided for convenience.

[0129] Vectors Lambda Zap (U.S. Pat. Nos. 5,128,256 and 5,286,636), Uni-Zap XR (U.S. Pat. Nos. 5,128,256 and 5,286,636), Zap Express (U.S. Pat. Nos. 5,128,256 and 5,286,636), pBLUESCRIPT™ (pBS) (Short, J. M. et al., Nucleic Acids Res. 16:7583-7600 (1988); Alting-Mees, M. A. and Short, J. M., Nucleic Acids Res. 17:9494 (1989)) and pBK (Alting-Mees, M. A. et al., Strategies 5:58-61 (1992)) are commercially available from Stratagene Cloning Systems, Inc., 11011 N. Torrey Pines Road, La Jolla, Calif., 92037. pBS contains an ampicillin resistance gene and pBK contains a neomycin resistance gene. Phagemid pBS may be excised from the Lambda Zap and Uni-Zap XR vectors, and phagemid pBK may be excised from the Zap Express vector. Both phagemids may be transformed into E. coli strain XL-1 Blue, also available from STRATAGENE™.

[0130] Vectors pSport1, pCMVSport 1.0, pCMVSport 2.0 and pCMVSport 3.0, were obtained from Life Technologies, Inc., P.O. Box 6009, Gaithersburg, Md. 20897. All Sport vectors contain an ampicillin resistance gene and may be transformed into E. coli strain DH10B, also available from LIFE TECHNOLOGIES™. See, for instance, Gruber, C. E., et al., Focus 15:59-(1993). Vector lafmid BA (Bento Soares, Columbia University, New York, N.Y.) contains an ampicillin resistance gene and can be transformed into E. coli strain XL-1 Blue. Vector pCR®2.1, which is available from Invitrogen, 1600 Faraday Avenue, Carlsbad, Calif. 92008, contains an ampicillin resistance gene and may be transformed into E. coli strain DH10B, available from LIFE TECHNOLOGIES™. See, for instance, Clark, J. M., Nuc. Acids Res. 16:9677-9686 (1988) and Mead, D. et al., Bio/Technology 9: (1991).

[0131] The present invention also relates to the genes corresponding to SEQ ID NO:X, SEQ ID NO:Y, and/or the deposited clone (ATCC Deposit No:Z). The corresponding gene can be isolated in accordance with known methods using the sequence information disclosed herein. Such methods include preparing probes or primers from the disclosed sequence and identifying or amplifying the corresponding gene from appropriate sources of genomic material.

[0132] Also provided in the present invention are allelic variants, orthologs, and/or species homologs. Procedures known in the art can be used to obtain full-length genes, allelic variants, splice variants, full-length coding portions, orthologs, and/or species homologs of genes corresponding to SEQ ID NO:X or the complement thereof, polypeptides encoded by genes corresponding to SEQ ID NO:X or the complement thereof, and/or the cDNA contained in ATCC Deposit No:Z, using information from the sequences disclosed herein or the clones deposited with the ATCC. For example, allelic variants and/or species homologs may be isolated and identified by making suitable probes or primers from the sequences provided herein and screening a suitable nucleic acid source for allelic variants and/or the desired homologue.

[0133] The polypeptides of the invention can be prepared in any suitable manner. Such polypeptides include isolated naturally occurring polypeptides, recombinantly produced polypeptides, synthetically produced polypeptides, or polypeptides produced by a combination of these methods. Means for preparing such polypeptides are well understood in the art.

[0134] The polypeptides may be in the form of the secreted protein, including the mature form, or may be a part of a larger protein, such as a fusion protein (see below). It is often advantageous to include an additional amino acid sequence which contains secretory or leader sequences, pro-sequences, sequences which aid in purification, such as multiple histidine residues, or an additional sequence for stability during recombinant production.

[0135] The polypeptides of the present invention are preferably provided in an isolated form, and preferably are substantially purified. A recombinantly produced version of a polypeptide, including the secreted polypeptide, can be substantially purified using techniques described herein or otherwise known in the art such as, for example, by the one-step method described in Smith and Johnson, Gene 67:3140 (1988). Polypeptides of the invention also can be purified from natural, synthetic or recombinant sources using techniques described herein or otherwise known in the art, such as, for example, antibodies of the invention raised against the polypeptides of the present invention in methods which are well known in the art.

[0136] The present invention provides a polynucleotide comprising, or alternatively consisting of, the nucleic acid sequence of SEQ ID NO:X and/or the cDNA sequence contained in ATCC Deposit No:Z. The present invention also provides a polypeptide comprising, or alternatively, consisting of, the polypeptide sequence of SEQ ID NO:Y, a polypeptide encoded by SEQ ID NO:X or a complement thereof, a polypeptide encoded by the cDNA contained in ATCC Deposit No:Z, and/or the polypeptide sequence encoded by a nucleotide sequence in SEQ ID NO:B as defined in column 6 of Table 1C. Polynucleotides encoding a polypeptide comprising, or alternatively consisting of the polypeptide sequence of SEQ ID NO:Y, a polypeptide encoded by SEQ ID NO:) a polypeptide encoded by the cDNA contained in ATCC Deposit No:Z, and/or a polypeptide sequence encoded by a nucleotide sequence in SEQ ID NO:B as defined in column 6 of Table 1C are also encompassed by the invention. The present invention further encompasses a polynucleotide comprising, or alternatively consisting of, the complement of the nucleic acid sequence of SEQ ID NO:X, a nucleic acid sequence encoding a polypeptide encoded by the complement of the nucleic acid sequence of SEQ ID NO:X, and/or the cDNA contained in ATCC Deposit No:Z.

[0137] Moreover, representative examples of polynucleotides of the invention comprise, or alternatively consist of, one, two, three, four, five, six, seven, eight, nine, ten, or more of the sequences delineated in Table 1C column 6, or any combination thereof. Additional, representative examples of polynucleotides of the invention comprise, or alternatively consist of, one, two, three, four, five, six, seven, eight, nine, ten, or more of the complementary strand(s) of the sequences delineated in Table 1C column 6, or any combination thereof. In further embodiments, the above-described polynucleotides of the invention comprise, or alternatively consist of, sequences delineated in Table 1C, column 6, and have a nucleic acid sequence which is different from that of the BAC fragment having the sequence disclosed in SEQ ID NO:B (see Table 1C, column 5). In additional embodiments, the above-described polynucleotides of the invention comprise, or alternatively consist of, sequences delineated in Table 1C, column 6, and have a nucleic acid sequence which is different from that published for the BAC clone identified as BAC ID NO:A (see Table 1C, column 4). In additional embodiments, the above-described polynucleotides of the invention comprise, or alternatively consist of, sequences delineated in Table 1C, column 6, and have a nucleic acid sequence which is different from that contained in the BAC clone identified as BAC ID NO:A (see Table 1C, column 4). Polypeptides encoded by these polynucleotides, other polynucleotides that encode these polypeptides, and antibodies that bind these polypeptides are also encompassed by the invention. Additionally, fragments and variants of the above-described polynucleotides and polypeptides are also encompassed by the invention.

[0138] Further, representative examples of polynucleotides of the invention comprise, or alternatively consist of, one, two, three, four, five, six, seven, eight, nine, ten, or more of the sequences delineated in column 6 of Table 1C which correspond to the same Clone ID (see Table 1C, column 1), or any combination thereof. Additional, representative examples of polynucleotides of the invention comprise, or alternatively consist of, one, two, three, four, five, six, seven, eight, nine, ten, or more of the complementary strand(s) of the sequences delineated in column 6 of Table 1C which correspond to the same Clone ID (see Table 1C, column 1), or any combination thereof. In further embodiments, the above-described polynucleotides of the invention comprise, or alternatively consist of, sequences delineated in column 6 of Table 1C which correspond to the same Clone ID (see Table 1C, column 1) and have a nucleic acid sequence which is different from that of the BAC fragment having the sequence disclosed in SEQ ID NO:B (see Table 1C, column 5). In additional embodiments, the above-described polynucleotides of the invention comprise, or alternatively consist of, sequences delineated in column 6 of Table 1C which correspond to the same Clone ID (see Table 1C, column 1) and have a nucleic acid sequence which is different from that published for the BAC clone identified as BAC ID NO:A (see Table 1C, column 4). In additional embodiments, the above-described polynucleotides of the invention comprise, or alternatively consist of, sequences delineated in column 6 of Table 1C which correspond to the same Clone ID (see Table 1C, column 1) and have a nucleic acid sequence which is different from that contained in the BAC clone identified as BAC ID NO:A (see Table 1C, column 4). Polypeptides encoded by these polynucleotides, other polynucleotides that encode these polypeptides, and antibodies that bind these polypeptides are also encompassed by the invention. Additionally, fragments and variants of the above-described polynucleotides and polypeptides are also encompassed by the invention.

[0139] Further, representative examples of polynucleotides of the invention comprise, or alternatively consist of, one, two, three, four, five, six, seven, eight, nine, ten, or more of the sequences delineated in column 6 of Table 1C which correspond to the same contig sequence identifier SEQ ID NO:X (see Table 1C, column 2), or any combination thereof. Additional, representative examples of polynucleotides of the invention comprise, or alternatively consist of, one, two, three, four, five, six, seven, eight, nine, ten, or more of the complementary strand(s) of the sequences delineated in column 6 of Table 1C which correspond to the same contig sequence identifier SEQ ID NO:X (see Table 1C, column 2), or any combination thereof. In further embodiments, the above-described polynucleotides of the invention comprise, or alternatively consist of, sequences delineated in column 6 of Table 1C which correspond to the same contig sequence identifier SEQ ID NO:X (see Table 1C, column 2) and have a nucleic acid sequence which is different from that of the BAC fragment having the sequence disclosed in SEQ ID NO:B (see Table 1C, column 5). In additional embodiments, the above-described polynucleotides of the invention comprise, or alternatively consist of, sequences delineated in column 6 of Table 1C which correspond to the same contig sequence identifier SEQ ID NO:X (see Table 1C, column 2) and have a nucleic acid sequence which is different from that published for the BAC clone identified as BAC ID NO:A (see Table 1C, column 4). In additional embodiments, the above-described polynucleotides of the invention comprise, or alternatively consist of, sequences delineated in column 6 of Table 1C which correspond to the same contig sequence identifier SEQ ID NO:X (see Table 1C, column 2) and have a nucleic acid sequence which is different from that contained in the BAC clone identified as BAC ID NO:A (See Table 1C, column 4). Polypeptides encoded by these polynucleotides, other polynucleotides that encode these polypeptides, and antibodies that bind these polypeptides are also encompassed by the invention. Additionally, fragments and variants of the above-described polynucleotides and polypeptides are also encompassed by the invention.

[0140] Moreover, representative examples of polynucleotides of the invention comprise, or alternatively consist of, one, two, three, four, five, six, seven, eight, nine, ten, or more of the sequences delineated in the same row of Table 1C column 6, or any combination thereof. Additional, representative examples of polynucleotides of the invention comprise, or alternatively consist of, one, two, three, four, five, six, seven, eight, nine, ten, or more of the complementary strand(s) of the sequences delineated in the same row of Table 1C column 6, or any combination thereof. In preferred embodiments, the polynucleotides of the invention comprise, or alternatively consist of, one, two, three, four, five, six, seven, eight, nine, ten, or more of the complementary strand(s) of the sequences delineated in the same row of Table 1C column 6, wherein sequentially delineated sequences in the table (i.e. corresponding to those exons located closest to each other) are directly contiguous in a 5′ to 3′ orientation. In further embodiments, above-described polynucleotides of the invention comprise, or alternatively consist of, sequences delineated in the same row of Table 1C, column 6, and have a nucleic acid sequence which is different from that of the BAC fragment having the sequence disclosed in SEQ ID NO:B (see Table 1C, column 5). In additional embodiments, the above-described polynucleotides of the invention comprise, or alternatively consist of, sequences delineated in the same row of Table 1C, column 6, and have a nucleic acid sequence which is different from that published for the BAC clone identified as BAC ID NO:A (see Table 1C, column 4). In additional embodiments, the above-described polynucleotides of the invention comprise, or alternatively consist of, sequences delineated in the same row of Table 1C, column 6, and have a nucleic acid sequence which is different from that contained in the BAC clone identified as BAC ID NO:A (see Table 1C, column 4). Polypeptides encoded by these polynucleotides, other polynucleotides that encode these polypeptides, and antibodies that bind these polypeptides are also encompassed by the invention.

[0141] In additional specific embodiments, polynucleotides of the invention comprise, or alternatively consist of, one, two, three, four, five, six, seven, eight, nine, ten, or more of the sequences delineated in column 6 of Table 1C, and the polynucleotide sequence of SEQ ID NO:X (e.g., as defined in Table 1C, column 2) or fragments or variants thereof. Polypeptides encoded by these polynucleotides, other polynucleotides that encode these polypeptides, and antibodies that bind these polypeptides are also encompassed by the invention.

[0142] In additional specific embodiments, polynucleotides of the invention comprise, or alternatively consist of, one, two, three, four, five, six, seven, eight, nine, ten, or more of the sequences delineated in column 6 of Table 1C which correspond to the same Clone ID (see Table 1C, column 1), and the polynucleotide sequence of SEQ ID NO:X (e.g., as defined in Table 1A, Table 1B, or Table 1C) or fragments or variants thereof. In preferred embodiments, the delineated sequence(s) and polynucleotide sequence of SEQ ID NO:X correspond to the same Clone ID. Polypeptides encoded by these polynucleotides, other polynucleotides that encode these polypeptides, and antibodies that bind these polypeptides are also encompassed by the invention.

[0143] In further specific embodiments, polynucleotides of the invention comprise, or alternatively consist of, one, two, three, four, five, six, seven, eight, nine, ten, or more of the sequences delineated in the same row of column 6 of Table 1C, and the polynucleotide sequence of SEQ ID NO:X (e.g., as defined in Table 1A, Table 1B, or Table 1C) or fragments or variants thereof. In preferred embodiments, the delineated sequence(s) and polynucleotide sequence of SEQ ID NO:X correspond to the same row of column 6 of Table 1C. Polypeptides encoded by these polynucleotides, other polynucleotides that encode these polypeptides, and antibodies that bind these polypeptides are also encompassed by the invention.

[0144] In additional specific embodiments, polynucleotides of the invention comprise, or alternatively consist of a polynucleotide sequence in which the 3′ 10 polynucleotides of one of the sequences delineated in column 6 of Table 1C and the 5′ 10 polynucleotides of the sequence of SEQ ID NO:X are directly contiguous. Nucleic acids that hybridize to the complement of these 20 contiguous polynucleotides under stringent hybridization conditions or alternatively, under lower stringency conditions, are also encompassed by the invention. Polypeptides encoded by these polynucleotides and/or nucleic acids, other polynucleotides and/or nucleic acids that encode these polypeptides, and antibodies that bind these polypeptides are also encompassed by the invention. Additionally, fragments and variants of the above-described polynucleotides, nucleic acids, and polypeptides are also encompassed by the invention.

[0145] In additional specific embodiments, polynucleotides of the invention comprise, or alternatively consist of, a polynucleotide sequence in which the 3′ 10 polynucleotides of one of the sequences delineated in column 6 of Table 1C and the 5′ 10 polynucleotides of a fragment or variant of the sequence of SEQ ID NO:X are directly contiguous Nucleic acids which hybridize to the complement of these 20 contiguous polynucleotides under stringent hybridization conditions or alternatively, under lower stringency conditions, are also encompassed by the invention. Polypeptides encoded by these polynucleotides and/or nucleic acids, other polynucleotides and/or nucleic acids encoding these polypeptides, and antibodies that bind these polypeptides are also encompassed by the invention. Additionally, fragments and variants of the above-described polynucleotides, nucleic acids, and polypeptides are also encompassed by the invention.

[0146] In specific embodiments, polynucleotides of the invention comprise, or alternatively consist of, a polynucleotide sequence in which the 3′ 10 polynucleotides of the sequence of SEQ ID NO:X and the 5′ 10 polynucleotides of the sequence of one of the sequences delineated in column 6 of Table 1C are directly contiguous. Nucleic acids which hybridize to the complement of these 20 contiguous polynucleotides under stringent hybridization conditions or alternatively, under lower stringency conditions, are also encompassed by the invention. Polypeptides encoded by these polynucleotides and/or nucleic acids, other polynucleotides and/or nucleic acids encoding these polypeptides, and antibodies that bind these polypeptides are also encompassed by the invention. Additionally, fragments and variants of the above-described polynucleotides, nucleic acids, and polypeptides are also encompassed by the invention.

[0147] In specific embodiments, polynucleotides of the invention comprise, or alternatively consist of, a polynucleotide sequence in which the 3′ 10 polynucleotides of a fragment or variant of the sequence of SEQ ID NO:X and the 5′ 10 polynucleotides of the sequence of one of the sequences delineated in column 6 of Table 1C are directly contiguous. Nucleic acids that hybridize to the complement of these 20 contiguous polynucleotides under stringent hybridization conditions or alternatively, under lower stringency conditions, are also encompassed by the invention. Polypeptides encoded by these polynucleotides and/or nucleic acids, other polynucleotides and/or nucleic acids encoding these polypeptides, and antibodies that bind these polypeptides are also encompassed by the invention. Additionally, fragments and variants of the above-described polynucleotides, nucleic acids, and polypeptides, are also encompassed by the invention.

[0148] In further specific embodiments, polynucleotides of the invention comprise, or alternatively consist of, a polynucleotide sequence in which the 3′ 10 polynucleotides of one of the sequences delineated in column 6 of Table 1C and the 5′ 10 polynucleotides of another sequence in column 6 are directly contiguous. Nucleic acids that hybridize to the complement of these 20 contiguous polynucleotides under stringent hybridization conditions or alternatively, under lower stringency conditions, are also encompassed by the invention. Polypeptides encoded by these polynucleotides and/or nucleic acids, other polynucleotides and/or nucleic acids encoding these polypeptides, and antibodies that bind these polypeptides are also encompassed by the invention. Additionally, fragments and variants of the above-described polynucleotides, nucleic acids, and polypeptides are also encompassed by the invention.

[0149] In specific embodiments, polynucleotides of the invention comprise, or alternatively consist of, a polynucleotide sequence in which the 3′ 10 polynucleotides of one of the sequences delineated in column 6 of Table 1C and the 5′ 10 polynucleotides of another sequence in column 6 corresponding to the same Clone ID (see Table 1C, column 1) are directly contiguous. Nucleic acids that hybridize to the complement of these 20 lower stringency conditions, are also encompassed by the invention. Polypeptides encoded by these polynucleotides and/or nucleic acids, other polynucleotides and/or nucleic acids encoding these polypeptides, and antibodies that bind these polypeptides are also encompassed by the invention. Additionally, fragments and variants of the above-described polynucleotides, nucleic acids, and polypeptides are also encompassed by the invention.

[0150] In specific embodiments, polynucleotides of the invention comprise, or alternatively consist of, a polynucleotide sequence in which the 3′ 10 polynucleotides of one sequence in column 6 corresponding to the same contig sequence identifer SEQ ID NO:X (see Table 1C, column 2) are directly contiguous. Nucleic acids that hybridize to the complement of these 20 contiguous polynucleotides under stringent hybridization conditions or alternatively, under lower stringency conditions, are also encompassed by the invention. Polypeptides encoded by these polynucleotides and/or nucleic acids, other polynucleotides and/or nucleic acids encoding these polypeptides, and antibodies that bind these polypeptides are also encompassed by the invention. Additionally, fragments and variants of the above-described polynucleotides, nucleic acids, and polypeptides are also encompassed by the invention.

[0151] In specific embodiments, polynucleotides of the invention comprise, or alternatively consist of a polynucleotide sequence in which the 3′ 10 polynucleotides of one of the sequences delineated in column 6 of Table 1C and the 5′ 10 polynucleotides of another sequence in column 6 corresponding to the same row are directly contiguous. In preferred embodiments, the 3′ 10 polynucleotides of one of the sequences delineated in column 6 of Table 1C is directly contiguous with the 5′ 10 polynucleotides of the next sequential exon delineated in Table 1C, column 6. Nucleic acids that hybridize to the complement of these 20 contiguous polynucleotides under stringent hybridization conditions or alternatively, under lower stringency conditions, are also encompassed by the invention. Polypeptides encoded by these polynucleotides and/or nucleic acids, other polynucleotides and/or nucleic acids encoding these polypeptides, and antibodies that bind these polypeptides are also encompassed by the invention. Additionally, fragments and variants of the above-described polynucleotides, nucleic acids, and polypeptides are also encompassed by the invention.

Table 3

[0152] Many polynucleotide sequences, such as EST sequences, are publicly available and accessible through sequence databases and may have been publicly available prior to conception of the present invention. Preferably, such related polynucleotides are specifically excluded from the scope of the present invention. Accordingly, for each contig sequence (SEQ ID NO:X) listed in the fifth column of Table 1A and/or the fourth column of Table 1B, preferably excluded are one or more polynucleotides comprising a nucleotide sequence described by the general formula of a−b, where a is any integer between 1 and the final nucleotide minus 15 of SEQ ID NO:X, b is an integer of 15 to the final nucleotide of SEQ ID NO:X, where both a and b correspond to the positions of nucleotide residues shown in SEQ ID NO:X, and where b is greater than or equal to a +14. More specifically, preferably excluded are one or more polynucleotides comprising a nucleotide sequence described by the general formula of a−b, where a and b are integers as defined in columns 4 and 5, respectively, of Table 3. In specific embodiments, the polynucleotides of the invention do not consist of at least one, two, three, four, five, ten, or more of the specific polynucleotide sequences referenced by the Genbank Accession No. as disclosed in column 6 of Table 3 (including for example, published sequence in connection with a particular BAC clone). In further embodiments, preferably excluded from the invention are the specific polynucleotide sequence(s) contained in the clones corresponding to at least one, two, three, four, five, ten, or more of the available material having the accession numbers identified in the sixth column of this Table (including for example, the actual sequence contained in an identified BAC clone). In no way is this listing meant to encompass all of the sequences that may be excluded by the general formula; it is just a representative example. All references available through these accessions are hereby incorporated by reference in their entirety. Table 3, from U.S. patent application Ser. No. 10/664,359, filed Sep. 20, 2003, is herein incorporated by reference.

Description of Table 4

[0153] Table 4 provides a key to the tissue/cell source identifier code disclosed in Table 1B.2, column 5. Column 1 of Table 4 provides the tissue/cell source identifier code disclosed in Table 1B.2, Column 58. Columns 2-5 provide a description of the tissue or cell source. Note that “Description” and “Tissue” sources (i.e. columns 2 and 3) having the prefix “a_” indicates organs, tissues, or cells derived from “adult” sources. Codes corresponding to diseased tissues are indicated in column 6 with the word “disease.” The use of the word “disease” in column 6 is non-limiting. The tissue or cell source may be specific (e.g. a neoplasm), or may be disease-associated (e.g., a tissue sample from a normal portion of a diseased organ). Furthermore, tissues and/or cells lacking the “disease” designation may still be derived from sources directly or indirectly involved in a disease state or disorder, and therefore may have a further utility in that disease state or disorder. In numerous cases where the tissue/cell source is a library, column 7 identifies the vector used to generate the library.

TABLE 4

| Code | Description | Tissue | Organ | Cell Line | Disease | Vector |
|---|---|---|---|---|---|---|
| AR022 | a_Heart | a_Heart | | | | |
| AR023 | a_Liver | a_Liver | | | | |
| AR024 | a_mammary gland | a_mammary gland | | | | |
| AR025 | a_Prostate | a_Prostate | | | | |
| AR026 | a_small intestine | a_small intestine | | | | |
| AR027 | a_Stomach | a_Stomach | | | | |
| AR028 | Blood B cells | Blood B cells | | | | |
| AR029 | Blood B cells activated | Blood B cells activated | | | | |
| AR030 | Blood B cells resting | Blood B cells resting | | | | |
| AR031 | Blood T cells activated | Blood T cells activated | | | | |
| AR032 | Blood T cells resting | Blood T cells resting | | | | |
| AR033 | brain | brain | | | | |
| AR034 | breast | breast | | | | |
| AR035 | breast cancer | breast cancer | | | | |
| AR036 | Cell Line CAOV3 | Cell Line CAOV3 | | | | |
| AR037 | cell line PA-1 | cell line PA-1 | | | | |
| AR038 | cell line transformed | cell line transformed | | | | |
| AR039 | colon | colon | | | | |
| AR040 | colon (9808co65R) | colon (9808co65R) | | | | |
| AR041 | colon (9809co15) | colon (9809co15) | | | | |
| AR042 | colon cancer | colon cancer | | | | |
| AR043 | colon cancer (9808co64R) | colon cancer (9808co64R) | | | | |
| AR044 | colon cancer 9809co14 | colon cancer 9809co14 | | | | |
| AR050 | Donor II B Cells 24 hrs | Donor II B Cells 24 hrs | | | | |
| AR051 | Donor II B Cells 72 hrs | Donor II B Cells 72 hrs | | | | |
| AR052 | Donor II B-Cells 24 hrs. | Donor II B-Cells 24 hrs. | | | | |
| AR053 | Donor II B-Cells 72 hrs | Donor II B-Cells 72 hrs | | | | |
| AR054 | Donor II Resting B Cells | Donor II Resting B Cells | | | | |
| AR055 | Heart | Heart | | | | |
| AR056 | Human Lung (clonetech) | Human Lung (clonetech) | | | | |
| AR057 | Human Mammary (CLONTECH ™) | Human Mammary (CLONTECH ™) | | | | |
| AR058 | Human Thymus (clonetech) | Human Thymus (clonetech) | | | | |
| AR059 | Jurkat (unstimulated) | Jurkat (unstimulated) | | | | |
| AR060 | Kidney | Kidney | | | | |
| AR061 | Liver | Liver | | | | |
| AR062 | Liver (CLONTECH ™) | Liver (CLONTECH ™) | | | | |
| AR063 | Lymphocytes chronic lymphocytic leukaemia | Lymphocytes chronic lymphocytic leukaemia | | | | |
| AR064 | Lymphocytes diffuse large B cell lymphoma | Lymphocytes diffuse large B cell lymphoma | | | | |
| AR065 | Lymphocytes follicular lymphoma | Lymphocytes follicular lymphoma | | | | |
| AR066 | normal breast | normal breast | | | | |
| AR067 | Normal Ovarian (4004901) | Normal Ovarian (4004901) | | | | |
| AR068 | Normal Ovary 9508G045 | Normal Ovary 9508G045 | | | | |
| AR069 | Normal Ovary 9701G208 | Normal Ovary 9701G208 | | | | |
| AR070 | Normal Ovary 9806G005 | Normal Ovary 9806G005 | | | | |
| AR071 | Ovarian Cancer | Ovarian Cancer | | | | |
| AR072 | Ovarian Cancer (9702G001) | Ovarian Cancer (9702G001) | | | | |
| AR073 | Ovarian Cancer (9707G029) | Ovarian Cancer (9707G029) | | | | |
| AR074 | Ovarian Cancer (9804G011) | Ovarian Cancer (9804G011) | | | | |
| AR075 | Ovarian Cancer (9806G019) | Ovarian Cancer (9806G019) | | | | |
| AR076 | Ovarian Cancer (9807G017) | Ovarian Cancer (9807G017) | | | | |
| AR077 | Ovarian Cancer (9809G001) | Ovarian Cancer (9809G001) | | | | |
| AR078 | ovarian cancer 15799 | ovarian cancer 15799 | | | | |
| AR079 | Ovarian Cancer 17717AID | Ovarian Cancer 17717AID | | | | |
| AR080 | Ovarian Cancer 4004664B1 | Ovarian Cancer 4004664B1 | | | | |
| AR081 | Ovarian Cancer 4005315A1 | Ovarian Cancer 4005315A1 | | | | |
| AR082 | ovarian cancer 94127303 | ovarian cancer 94127303 | | | | |
| AR083 | Ovarian Cancer 96069304 | Ovarian Cancer 96069304 | | | | |
| AR084 | Ovarian Cancer 9707G029 | Ovarian Cancer 9707G029 | | | | |
| AR085 | Ovarian Cancer 9807G045 | Ovarian Cancer 9807G045 | | | | |
| AR086 | ovarian cancer 9809G001 | ovarian cancer 9809G001 | | | | |
| AR087 | Ovarian Cancer 9905C032RC | Ovarian Cancer 9905C032RC | | | | |
| AR088 | Ovarian cancer 9907 C00 3rd | Ovarian cancer 9907 C00 3rd | | | | |
| AR089 | Prostate | Prostate | | | | |
| AR090 | Prostate (clonetech) | Prostate (clonetech) | | | | |
| AR091 | prostate cancer | prostate cancer | | | | |
| AR092 | prostate cancer #15176 | prostate cancer #15176 | | | | |
| AR093 | prostate cancer #15509 | prostate cancer #15509 | | | | |
| AR094 | prostate cancer #15673 | prostate cancer #15673 | | | | |
| AR095 | Small Intestine (CLONTECH ™) | Small Intestine (CLONTECH ™) | | | | |
| AR096 | Spleen | Spleen | | | | |
| AR097 | Thymus T cells activated | Thymus T cells activated | | | | |
| AR098 | Thymus T cells resting | Thymus T cells resting | | | | |
| AR099 | Tonsil | Tonsil | | | | |
| AR100 | Tonsil geminal center centroblast | Tonsil geminal center centroblast | | | | |
| AR101 | Tonsil germinal center B cell | Tonsil germinal center B cell | | | | |
| AR102 | Tonsil lymph node | Tonsil lymph node | | | | |
| AR103 | Tonsil memory B cell | Tonsil memory B cell | | | | |
| AR104 | Whole Brain | Whole Brain | | | | |
| AR105 | Xenograft ES-2 | Xenograft ES-2 | | | | |
| AR106 | Xenograft SW626 | Xenograft SW626 | | | | |
| AR119 | 001: IL-2 | 001: IL-2 | | | | |
| AR120 | 001: IL-2.1 | 001: IL-2.1 | | | | |
| AR121 | 001: IL-2_b | 001: IL-2_b | | | | |
| AR124 | 002: Monocytes untreated (1 hr) | 002: Monocytes untreated (1 hr) | | | | |
| AR125 | 002: Monocytes untreated (5 hrs) | 002: Monocytes untreated (5 hrs) | | | | |
| AR126 | 002: Control.1C | 002: Control.1C | | | | |
| AR130 | 003: Placebo-treated Rat Lacrimal Gland | 003: Placebo-treated Rat Lacrimal Gland | | | | |
| AR131 | 003: Placebo-treated Rat Submandibular Gland | 003: Placebo-treated Rat Submandibular Gland | | | | |
| AR135 | 004: Monocytes untreated (5 hrs) | 004: Monocytes untreated (5 hrs) | | | | |
| AR136 | 004: Monocytes untreated 1 hr | 004: Monocytes untreated 1 hr | | | | |
| AR152 | 007: PHA(1 hr) | 007: PHA(1 hr) | | | | |
| AR153 | 007: PHA(6 HRS) | 007: PHA(6 HRS) | | | | |
| AR154 | 007: PMA(6 hrs) | 007: PMA(6 hrs) | | | | |
| AR155 | 008: 1449_#2 | 008: 1449_#2 | | | | |
| AR161 | 01: A - max 24 | 01: A - max 24 | | | | |
| AR162 | 01: A - max 26 | 01: A - max 26 | | | | |
| AR163 | 01: A - max 30 | 01: A - max 30 | | | | |
| AR164 | 01: B - max 24 | 01: B - max 24 | | | | |
| AR165 | 01: B - max 26 | 01: B - max 26 | | | | |
| AR166 | 01: B - max 30 | 01: B - max 30 | | | | |
| AR167 | 1449 Sample | 1449 Sample | | | | |
| AR168 | 3T3P10 1.0 uM insulin | 3T3P10 1.0 uM insulin | | | | |
| AR169 | 3T3P10 10 nM Insulin | 3T3P10 10 nM Insulin | | | | |
| AR170 | 3T3P10 10 uM insulin | 3T3P10 10 uM insulin | | | | |
| AR171 | 3T3P10 No Insulin | 3T3P10 No Insulin | | | | |
| AR172 | 3T3P4 | 3T3P4 | | | | |
| AR173 | Adipose (41892) | Adipose (41892) | | | | |
| AR174 | Adipose Diabetic (41611) | Adipose Diabetic (41611) | | | | |
| AR175 | Adipose Diabetic (41661) | Adipose Diabetic (41661) | | | | |
| AR176 | Adipose Diabetic (41689) | Adipose Diabetic (41689) | | | | |
| AR177 | Adipose Diabetic (41706) | Adipose Diabetic (41706) | | | | |
| AR178 | Adipose Diabetic (42352) | Adipose Diabetic (42352) | | | | |
| AR179 | Adipose Diabetic (42366) | Adipose Diabetic (42366) | | | | |
| AR180 | Adipose Diabetic (42452) | Adipose Diabetic (42452) | | | | |
| AR181 | Adipose Diabetic (42491) | Adipose Diabetic (42491) | | | | |
| AR182 | Adipose Normal (41843) | Adipose Normal (41843) | | | | |
| AR183 | Adipose Normal (41893) | Adipose Normal (41893) | | | | |
| AR184 | Adipose Normal (42452) | Adipose Normal (42452) | | | | |
| AR185 | Adrenal Gland | Adrenal Gland | | | | |
| AR186 | Adrenal Gland + Whole Brain | Adrenal Gland + Whole Brain | | | | |
| AR187 | B7(1 hr) + (inverted) | B7(1 hr) + (inverted) | | | | |
| AR188 | Breast (18275A2B) | Breast (18275A2B) | | | | |
| AR189 | Breast (4004199) | Breast (4004199) | | | | |
| AR190 | Breast (4004399) | Breast (4004399) | | | | |
| AR191 | Breast (4004943B7) | Breast (4004943B7) | | | | |
| AR192 | Breast (4005570B1) | Breast (4005570B1) | | | | |
| AR193 | Breast Cancer (4004127A30) | Breast Cancer (4004127A30) | | | | |
| AR194 | Breast Cancer (400443A21) | Breast Cancer (400443A21) | | | | |
| AR195 | Breast Cancer (4004643A2) | Breast Cancer (4004643A2) | | | | |
| AR196 | Breast Cancer (4004710A7) | Breast Cancer (4004710A7) | | | | |
| AR197 | Breast Cancer (4004943A21) | Breast Cancer (4004943A21) | | | | |
| AR198 | Breast Cancer (400553A2) | Breast Cancer (400553A2) | | | | |
| AR199 | Breast Cancer (9805C046R) | Breast Cancer (9805C046R) | | | | |
| AR200 | Breast Cancer (9806C012R) | Breast Cancer (9806C012R) | | | | |
| AR201 | Breast Cancer (ODQ 45913) | Breast Cancer (ODQ 45913) | | | | |
| AR202 | Breast Cancer (ODQ45913) | Breast Cancer (ODQ45913) | | | | |
| AR203 | Breast Cancer (ODQ4591B) | Breast Cancer (ODQ4591B) | | | | |
| AR204 | Colon Cancer (15663) | Colon Cancer (15663) | | | | |
| AR205 | Colon Cancer (4005144A4) | Colon Cancer (4005144A4) | | | | |
| AR206 | Colon Cancer (4005413A4) | Colon Cancer (4005413A4) | | | | |
| AR207 | Colon Cancer (4005570B1) | Colon Cancer (4005570B1) | | | | |
| AR208 | Control RNA #1 | Control RNA #1 | | | | |
| AR209 | Control RNA #2 | Control RNA #2 | | | | |
| AR210 | Cultured Preadipocyte (blue) | Cultured Preadipocyte (blue) | | | | |
| AR211 | Cultured Preadipocyte (Red) | Cultured Preadipocyte (Red) | | | | |
| AR212 | Donor II B-Cells 24 hrs | Donor II B-Cells 24 hrs | | | | |
| AR213 | Donor II Resting B-Cells | Donor II Resting B-Cells | | | | |
| AR214 | H114EP12 10 nM Insulin | H114EP12 10 nM Insulin | | | | |
| AR215 | H114EP12 (10 nM insulin) | H114EP12 (10 nM insulin) | | | | |
| AR216 | H114EP12 (2.6 ug/ul) | H114EP12 (2.6 ug/ul) | | | | |
| AR217 | H114EP12 (3.6 ug/ul) | H114EP12 (3.6 ug/ul) | | | | |
| AR218 | HUVEC #1 | HUVEC #1 | | | | |
| AR219 | HUVEC #2 | HUVEC #2 | | | | |
| AR221 | L6 undiff. | L6 undiff. | | | | |
| AR222 | L6 Undifferentiated | L6 Undifferentiated | | | | |
| AR223 | L6P8 + 10 nM Insulin | L6P8 + 10 nM Insulin | | | | |
| AR224 | L6P8 + HS | L6P8 + HS | | | | |
| AR225 | L6P8 10 nM Insulin | L6P8 10 nM Insulin | | | | |
| AR226 | Liver (00-06-A007B) | Liver (00-06-A007B) | | | | |
| AR227 | Liver (96-02-A075) | Liver (96-02-A075) | | | | |
| AR228 | Liver (96-03-A144) | Liver (96-03-A144) | | | | |
| AR229 | Liver (96-04-A138) | Liver (96-04-A138) | | | | |
| AR230 | Liver (97-10-A074B) | Liver (97-10-A074B) | | | | |
| AR231 | Liver (98-09-A242A) | Liver (98-09-A242A) | | | | |
| AR232 | Liver Diabetic (1042) | Liver Diabetic (1042) | | | | |
| AR233 | Liver Diabetic (41616) | Liver Diabetic (41616) | | | | |
| AR234 | Liver Diabetic (41955) | Liver Diabetic (41955) | | | | |
| AR235 | Liver Diabetic (42352R) | Liver Diabetic (42352R) | | | | |
| AR236 | Liver Diabetic (42366) | Liver Diabetic (42366) | | | | |
| AR237 | Liver Diabetic (42483) | Liver Diabetic (42483) | | | | |
| AR238 | Liver Diabetic (42491) | Liver Diabetic (42491) | | | | |
| AR239 | Liver Diabetic (99-09-A281A) | Liver Diabetic (99-09-A281A) | | | | |
| AR240 | Lung | Lung | | | | |
| AR241 | Lung (27270) | Lung (27270) | | | | |
| AR242 | Lung (2727Q) | Lung (2727Q) | | | | |
| AR243 | Lung Cancer (4005116A1) | Lung Cancer (4005116A1) | | | | |
| AR244 | Lung Cancer (4005121A5) | Lung Cancer (4005121A5) | | | | |
| AR245 | Lung Cancer (4005121A5)) | Lung Cancer (4005121A5)) | | | | |
| AR246 | Lung Cancer (4005340A4) | Lung Cancer (4005340A4) | | | | |
| AR247 | Mammary Gland | Mammary Gland | | | | |
| AR248 | Monocyte (CT) | Monocyte (CT) | | | | |
| AR249 | Monocyte (OCT) | Monocyte (OCT) | | | | |
| AR250 | Monocytes (CT) | Monocytes (CT) | | | | |
| AR251 | Monocytes (INFG 18 hr) | Monocytes (INFG 18 hr) | | | | |
| AR252 | Monocytes (INFG 18 hr) | Monocytes (INFG 18 hr) | | | | |
| AR253 | Monocytes (INFG 8-11) | Monocytes (INFG 8-11) | | | | |
| AR254 | Monocytes (O CT) | Monocytes (O CT) | | | | |
| AR255 | Muscle (91-01-A105) | Muscle (91-01-A105) | | | | |
| AR256 | Muscle (92-04-A059) | Muscle (92-04-A059) | | | | |
| AR257 | Muscle (97-11-A056d) | Muscle (97-11-A056d) | | | | |
| AR258 | Muscle (99-06-A210A) | Muscle (99-06-A210A) | | | | |
| AR259 | Muscle (99-07-A203B) | Muscle (99-07-A203B) | | | | |
| AR260 | Muscle (99-7-A203B) | Muscle (99-7-A203B) | | | | |
| AR261 | Muscle Diabetic (42352R) | Muscle Diabetic (42352R) | | | | |
| AR262 | Muscle Diabetic (42366) | Muscle Diabetic (42366) | | | | |
| AR263 | NK-19 Control | NK-19 Control | | | | |
| AR264 | NK-19 IL Treated 72 hrs | NK-19 IL Treated 72 hrs | | | | |
| AR265 | NK-19 UK Treated 72 hrs. | NK-19 UK Treated 72 hrs. | | | | |
| AR266 | Omentum Normal (94-08-B009) | Omentum Normal (94-08-B009) | | | | |
| AR267 | Omentum Normal (97-01-A039A) | Omentum Normal (97-01-A039A) | | | | |
| AR268 | Omentum Normal (97-04-A114C) | Omentum Normal (97-04-A114C) | | | | |
| AR269 | Omentum Normal (97-06-A117C) | Omentum Normal (97-06-A117C) | | | | |
| AR270 | Omentum Normal (97-09-B004C) | Omentum Normal (97-09-B004C) | | | | |
| AR271 | Ovarian Cancer (17717AID) | Ovarian Cancer (17717AID) | | | | |
| AR272 | Ovarian Cancer (9905C023RC) | Ovarian Cancer (9905C023RC) | | | | |
| AR273 | Ovarian Cancer (9905C032RC) | Ovarian Cancer (9905C032RC) | | | | |
| AR274 | Ovary (9508G045) | Ovary (9508G045) | | | | |
| AR275 | Ovary (9701G208) | Ovary (9701G208) | | | | |
| AR276 | Ovary 9806G005 | Ovary 9806G005 | | | | |
| AR277 | Pancreas | Pancreas | | | | |
| AR278 | Placebo | Placebo | | | | |
| AR279 | rIL2 Control | rIL2 Control | | | | |
| AR280 | RSS288L | RSS288L | | | | |
| AR281 | RSS288LC | RSS288LC | | | | |
| AR282 | Salivary Gland | Salivary Gland | | | | |
| AR283 | Skeletal Muscle | Skeletal Muscle | | | | |
| AR284 | Skeletal Muscle (91-01-A105) | Skeletal Muscle (91-01-A105) | | | | |
| AR285 | Skeletal Muscle (42180) | Skeletal Muscle (42180) | | | | |
| AR286 | Skeletal Muscle (42386) | Skeletal Muscle (42386) | | | | |
| AR287 | Skeletal Muscle (42461) | Skeletal Muscle (42461) | | | | |
| AR288 | Skeletal Muscle (91-01-A105) | Skeletal Muscle (91-01-A105) | | | | |
| AR289 | Skeletal Muscle (92-04-A059) | Skeletal Muscle (92-04-A059) | | | | |
| AR290 | Skeletal Muscle (96-08-A171) | Skeletal Muscle (96-08-A171) | | | | |
| AR291 | Skeletal Muscle (97-07-A190A) | Skeletal Muscle (97-07-A190A) | | | | |
| AR292 | Skeletal Muscle Diabetic (42352) | Skeletal Muscle Diabetic (42352) | | | | |
| AR293 | Skeletal Muscle Diabetic (42366) | Skeletal Muscle Diabetic (42366) | | | | |
| AR294 | Skeletal Muscle Diabetic (42395) | Skeletal Muscle Diabetic (42395) | | | | |
| AR295 | Skeletal Muscle Diabetic (42483) | Skeletal Muscle Diabetic (42483) | | | | |
| AR296 | Skeletal Muscle Diabetic (42491) | Skeletal Muscle Diabetic (42491) | | | | |
| AR297 | Skeletal Muscle Diabetic 42352 | Skeletal Muscle Diabetic 42352 | | | | |
| AR298 | Skeletal Musle (42461) | Skeletal Musle (42461) | | | | |
| AR299 | Small Intestine | Small Intestine | | | | |
| AR300 | Stomach | Stomach | | | | |
| AR301 | T-Cell + HDPBQ71.fc 1449 16 hrs | T-Cell + HDPBQ71.fc 1449 16 hrs | | | | |
| AR302 | T-Cell + HDPBQ71.fc 1449 6 hrs | T-Cell + HDPBQ71.fc 1449 6 hrs | | | | |
| AR303 | T-Cell + IL2 16 hrs | T-Cell + IL2 16 hrs | | | | |
| AR304 | T-Cell + IL2 6 hrs | T-Cell + IL2 6 hrs | | | | |
| AR306 | T-Cell Untreated 16 hrs | T-Cell Untreated 16 hrs | | | | |
| AR307 | T-Cell Untreated 6 hrs | T-Cell Untreated 6 hrs | | | | |
| AR308 | T-Cells 24 hours | T-Cells 24 hours | | | | |
| AR309 | T-Cells 24 hrs | T-Cells 24 hrs | | | | |
| AR310 | T-Cells 24 hrs. | T-Cells 24 hrs. | | | | |
| AR311 | T-Cells 24 hrs | T-Cells 24 hrs | | | | |
| AR312 | T-Cells 4 days | T-Cells 4 days | | | | |
| AR313 | Thymus | Thymus | | | | |
| AR314 | TRE | TRE | | | | |
| AR315 | TREC | TREC | | | | |
| AR317 | B lymphocyte, | B lymphocyte, | | | | |
| AR318 | (non-T; non-B) | (non-T; non-B) | | | | |
| AR326 | 001-293 RNA (Vector Control) | 001-293 RNA (Vector Control) | | | | |
| AR327 | 001: Control | 001: Control | | | | |
| AR328 | 001: Control.1 | 001: Control.1 | | | | |
| AR355 | Acute Lymphocyte Leukemia | Acute Lymphocyte Leukemia | | | | |
| AR356 | AML Patient #11 | AML Patient #11 | | | | |
| AR357 | AML Patient #2 | AML Patient #2 | | | | |
| AR358 | AML Patient #2 SGAH | AML Patient #2 SGAH | | | | |
| AR359 | AML Patient#2 | AML Patient#2 | | | | |
| AR360 | Aorta | Aorta | | | | |
| AR361 | B Cell | B Cell | | | | |
| AR362 | B lymphoblast | B lymphoblast | | | | |
| AR363 | B lymphocyte | B lymphocyte | | | | |
| AR364 | B lymphocytes | B lymphocytes | | | | |
| AR365 | B-cell | B-cell | | | | |
| AR366 | B-Cells | B-Cells | | | | |
| AR367 | B-Lymphoblast | B-Lymphoblast | | | | |
| AR368 | B-Lymphocytes | B-Lymphocytes | | | | |
| AR369 | Bladder | Bladder | | | | |
| AR370 | Bone Marrow | Bone Marrow | | | | |
| AR371 | Bronchial Epithelial Cell | Bronchial Epithelial Cell | | | | |
| AR372 | Bronchial Epithelial Cells | Bronchial Epithelial Cells | | | | |
| AR373 | Caco-2A | Caco-2A | | | | |
| AR374 | Caco-2B | Caco-2B | | | | |
| AR375 | Caco-2C | Caco-2C | | | | |
| AR376 | Cardiac #1 | Cardiac #1 | | | | |
| AR377 | Cardiac #2 | Cardiac #2 | | | | |
| AR378 | Chest Muscle | Chest Muscle | | | | |
| AR381 | Dendritic Cell | Dendritic Cell | | | | |
| AR382 | Dendritic cells | Dendritic cells | | | | |
| AR383 | E. coli | E. coli | | | | |
| AR384 | Epithelial Cells | Epithelial Cells | | | | |
| AR385 | Esophagus | Esophagus | | | | |
| AR386 | FPPS | FPPS | | | | |
| AR387 | FPPSC | FPPSC | | | | |
| AR388 | HepG2 Cell Line | HepG2 Cell Line | | | | |
| AR389 | HepG2 Cell line Buffer 1 hr. | HepG2 Cell line Buffer 1 hr. | | | | |
| AR390 | HepG2 Cell line Buffer 06 hr | HepG2 Cell line Buffer 06 hr | | | | |
| AR391 | HepG2 Cell line Buffer 24 hr. | HepG2 Cell line Buffer 24 hr. | | | | |
| AR392 | HepG2 Cell line Insulin 01 hr. | HepG2 Cell line Insulin 01 hr. | | | | |
| AR393 | HepG2 Cell line Insulin 06 hr. | HepG2 Cell line Insulin 06 hr. | | | | |
| AR394 | HepG2 Cell line Insulin 24 hr. | HepG2 Cell line Insulin 24 hr. | | | | |
| AR398 | HMC-1 | HMC-1 | | | | |
| AR399 | HMCS | HMCS | | | | |
| AR400 | HMSC | HMSC | | | | |
| AR401 | HUVEC #3 | HUVEC #3 | | | | |
| AR402 | HUVEC #4 | HUVEC #4 | | | | |
| AR404 | KIDNEY NORMAL | KIDNEY NORMAL | | | | |
| AR405 | KIDNEY TUMOR | KIDNEY TUMOR | | | | |
| AR406 | KIDNEY TUMOR | | | | | |
| AR407 | Lymph Node | Lymph Node | | | | |
| AR408 | Macrophage | Macrophage | | | | |
| AR409 | Megakarioblast | Megakarioblast | | | | |
| AR410 | Monocyte | Monocyte | | | | |
| AR411 | Monocytes | Monocytes | | | | |
| AR412 | Myocardium | Myocardium | | | | |
| AR413 | Myocardium #3 | Myocardium #3 | | | | |
| AR414 | Myocardium #4 | Myocardium #4 | | | | |
| AR415 | Myocardium #5 | Myocardium #5 | | | | |
| AR416 | NK | NK | | | | |
| AR417 | NK cell | NK cell | | | | |
| AR418 | NK cells | NK cells | | | | |
| AR419 | NKYa | NKYa | | | | |
| AR420 | NKYa019 | NKYa019 | | | | |
| AR421 | Ovary | Ovary | | | | |
| AR422 | Patient #11 | Patient #11 | | | | |
| AR423 | Peripheral blood | Peripheral blood | | | | |
| AR424 | Primary Adipocytes | Primary Adipocytes | | | | |
| AR425 | Promyeloblast | Promyeloblast | | | | |
| AR427 | RSSWT | RSSWT | | | | |
| AR428 | RSSWTC | RSSWTC | | | | |
| AR429 | SW 480(G1) | SW 480(G1) | | | | |
| AR430 | SW 480(G2) | SW 480(G2) | | | | |
| AR431 | SW 480(G3) | SW 480(G3) | | | | |
| AR432 | SW 480(G4) | SW 480(G4) | | | | |
| AR433 | SW 480(G5) | SW 480(G5) | | | | |
| AR434 | T Lymphoblast | T Lymphoblast | | | | |
| AR435 | T Lymphocyte | T Lymphocyte | | | | |
| AR436 | T-Cell | T-Cell | | | | |
| AR438 | T-Cell, | T-Cell, | | | | |
| AR439 | T-Cells | T-Cells | | | | |
| AR440 | T-lymphoblast | T-lymphoblast | | | | |
| AR441 | Th 1 | Th 1 | | | | |
| AR442 | Th 2 | Th 2 | | | | |
| AR443 | Th1 | Th1 | | | | |
| AR444 | Th2 | Th2 | | | | |
| H0002 | Human Adult Heart | Human Adult Heart | Heart | | | Uni-ZAP XR |
| H0004 | Human Adult Spleen | Human Adult Spleen | Spleen | | | Uni-ZAP XR |
| H0008 | Whole 6 Week Old Embryo | | | | | Uni-ZAP XR |
| H0009 | Human Fetal Brain | | | | | Uni-ZAP XR |
| H0012 | Human Fetal Kidney | Human Fetal Kidney | Kidney | | | Uni-ZAP XR |
| H0013 | Human 8 Week Whole Embryo | Human 8 Week Old Embryo | Embryo | | | Uni-ZAP XR |
| H0014 | Human Gall Bladder | Human Gall Bladder | Gall Bladder | | | Uni-ZAP XR |
| H0015 | Human Gall Bladder, fraction II | Human Gall Bladder | Gall Bladder | | | Uni-ZAP XR |
| H0024 | Human Fetal Lung III | Human Fetal Lung | Lung | | | Uni-ZAP XR |
| H0030 | Human Placenta | | | | | Uni-ZAP XR |
| H0031 | Human Placenta | Human Placenta | Placenta | | | Uni-ZAP XR |
| H0032 | Human Prostate | Human Prostate | Prostate | | | Uni-ZAP XR |
| H0033 | Human Pituitary | Human Pituitary | | | | Uni-ZAP XR |
| H0036 | Human Adult Small Intestine | Human Adult Small Intestine | Small Int. | | | Uni-ZAP XR |
| H0038 | Human Testes | Human Testes | Testis | | | Uni-ZAP XR |
| H0039 | Human Pancreas Tumor | Human Pancreas Tumor | Pancreas | | disease | Uni-ZAP XR |
| H0040 | Human Testes Tumor | Human Testes Tumor | Testis | | disease | Uni-ZAP XR |
| H0041 | Human Fetal Bone | Human Fetal Bone | Bone | | | Uni-ZAP XR |
| H0042 | Human Adult Pulmonary | Human Adult Pulmonary | Lung | | | Uni-ZAP XR |
| H0046 | Human Endometrial Tumor | Human Endometrial Tumor | Uterus | | disease | Uni-ZAP XR |
| H0048 | Human Pineal Gland | Human Pineal Gland | | | | Uni-ZAP XR |
| H0050 | Human Fetal Heart | Human Fetal Heart | Heart | | | Uni-ZAP XR |
| H0051 | Human Hippocampus | Human Hippocampus | Brain | | | Uni-ZAP XR |
| H0052 | Human Cerebellum | Human Cerebellum | Brain | | | Uni-ZAP XR |
| H0056 | Human Umbilical Vein, Endo. remake | Human Umbilical Vein Endothelial Cells | Umbilical vein | | | Uni-ZAP XR |
| H0057 | Human Fetal Spleen | | | | | Uni-ZAP XR |
| H0058 | Human Thymus Tumor | Human Thymus Tumor | Thymus | | disease | Lambda ZAP II |
| H0059 | Human Uterine Cancer | Human Uterine Cancer | Uterus | | disease | Lambda ZAP II |
| H0061 | Human Macrophage | Human Macrophage | Blood | Cell Line | | pBLUESCRIPT ™ |
| H0063 | Human Thymus | Human Thymus | Thymus | | | Uni-ZAP XR |
| H0069 | Human Activated T-Cells | Activated T-Cells | Blood | Cell Line | | Uni-ZAP XR |
| H0070 | Human Pancreas | Human Pancreas | Pancreas | | | Uni-ZAP XR |
| H0071 | Human Infant Adrenal Gland | Human Infant Adrenal Gland | Adrenal gland | | | Uni-ZAP XR |
| H0078 | Human Lung Cancer | Human Lung Cancer | Lung | | disease | Lambda ZAP II |
| H0081 | Human Fetal Epithelium (Skin) | Human Fetal Skin | Skin | | | Uni-ZAP XR |
| H0083 | HUMAN JURKAT MEMBRANE BOUND POLYSOMES | Jurkat Cells | | | | Uni-ZAP XR |
| H0085 | Human Colon | Human Colon | | | | Lambda ZAP II |
| H0086 | Human epithelioid sarcoma | Epithelioid Sarcoma, muscle | Sk Muscle | | disease | Uni-ZAP XR |
| H0087 | Human Thymus | Human Thymus | | | | pBLUESCRIPT ™ |
| H0090 | Human T-Cell Lymphoma | T-Cell Lymphoma | T-Cell | | disease | Uni-ZAP XR |
| H0098 | Human Adult Liver, subtracted | Human Adult Liver | Liver | | | Uni-ZAP XR |
| H0100 | Human Whole Six Week Old Embryo | Human Whole Six Week Old Embryo | Embryo | | | Uni-ZAP XR |
| H0101 | Human 7 Weeks Old Embryo, subtracted | Human Whole 7 Week Old Embryo | Embryo | | | Lambda ZAP II |
| H0102 | Human Whole 6 Week Old Embryo (II), subt | Human Whole Six Week Old Embryo | Embryo | | | pBLUESCRIPT ™ |
| H0107 | Human Infant Adrenal Gland, subtracted | Human Infant Adrenal Gland | Adrenal gland | | | pBLUESCRIPT ™ |
| H0116 | Human Thymus Tumor, subtracted | Human Thymus Tumor | Thymus | | | pBLUESCRIPT ™ |
| H0118 | Human Adult Kidney | Human Adult Kidney | Kidney | | | Uni-ZAP XR |
| H0120 | Human Adult Spleen, subtracted | Human Adult Spleen | Spleen | | | Uni-ZAP XR |
| H0122 | Human Adult Skeletal Muscle | Human Skeletal Muscle | Sk Muscle | | | Uni-ZAP XR |
| H0123 | Human Fetal Dura Mater | Human Fetal Dura Mater | Brain | | | Uni-ZAP XR |
| H0124 | Human Rhabdomyosarcoma | Human Rhabdomyosarcoma | Sk Muscle | | disease | Uni-ZAP XR |
| H0125 | Cem cells cyclohexamide treated | Cyclohexamide Treated Cem, Jurkat, Raji, and Supt | Blood | Cell Line | | Uni-ZAP XR |
| H0131 | LNCAP + o.3 nM R1881 | LNCAP Cell Line | Prostate | Cell Line | | Uni-ZAP XR |
| H0132 | LNCAP + 30 nM R1881 | LNCAP Cell Line | Prostate | Cell Line | | Uni-ZAP XR |
| H0134 | Raji Cells, cyclohexamide treated | Cyclohexamide Treated Cem, Jurkat, Raji, and Supt | Blood | Cell Line | | Uni-ZAP XR |
| H0135 | Human Synovial Sarcoma | Human Synovial Sarcoma | Synovium | | | Uni-ZAP XR |
| H0136 | Supt Cells, cyclohexamide treated | Cyclohexamide Treated Cem, Jurkat, Raji, and Supt | Blood | Cell Line | | Uni-ZAP XR |
| H0141 | Activated T-Cells, 12 hrs. | Activated T-Cells | Blood | Cell Line | | Uni-ZAP XR |
| H0144 | Nine Week Old Early Stage Human | 9 Wk Old Early Stage Human | Embryo | | | Uni-ZAP XR |
| H0147 | Human Adult Liver | Human Adult Liver | Liver | | | Uni-ZAP XR |
| H0149 | 7 Week Old Early Stage Human, subtracted | Human Whole 7 Week Old Embryo | Embryo | | | Uni-ZAP XR |
| H0150 | Human Epididymus | Epididymis | Testis | | | Uni-ZAP XR |
| H0154 | Human Fibrosarcoma | Human Skin Fibrosarcoma | Skin | | disease | Uni-ZAP XR |
| H0156 | Human Adrenal Gland Tumor | Human Adrenal Gland Tumor | Adrenal Gland | | disease | Uni-ZAP XR |
| H0159 | Activated T-Cells, 8 hrs., ligation 2 | Activated T-Cells | Blood | Cell Line | | Uni-ZAP XR |
| H0163 | Human Synovium | Human Synovium | Synovium | | | Uni-ZAP XR |
| H0165 | Human Prostate Cancer, Stage B2 | Human Prostate Cancer, stage B2 | Prostate | | disease | Uni-ZAP XR |
| H0166 | Human Prostate Cancer, Stage B2 fraction | Human Prostate Cancer, stage B2 | Prostate | | disease | Uni-ZAP XR |
| H0169 | Human Prostate Cancer, Stage C fraction | Human Prostate Cancer, stage C | Prostate | | disease | Uni-ZAP XR |
| H0170 | 12 Week Old Early Stage Human | Twelve Week Old Early Stage Human | Embryo | | | Uni-ZAP XR |
| H0171 | 12 Week Old Early Stage Human, II | Twelve Week Old Early Stage Human | Embryo | | | Uni-ZAP XR |
| H0176 | CAMA1Ee Cell Line | CAMA1Ee Cell Line | Breast | Cell Line | | Uni-ZAP XR |
| H0178 | Human Fetal Brain | Human Fetal Brain | Brain | | | Uni-ZAP XR |
| H0179 | Human Neutrophil | Human Neutrophil | Blood | Cell Line | | Uni-ZAP XR |
| H0181 | Human Primary Breast Cancer | Human Primary Breast Cancer | Breast | | disease | Uni-ZAP XR |
| H0183 | Human Colon Cancer | Human Colon Cancer | Colon | | disease | Uni-ZAP XR |
| H0187 | Resting T-Cell | T-Cells | Blood | Cell Line | | Lambda ZAP II |
| H0188 | Human Normal Breast | Human Normal Breast | Breast | | | Uni-ZAP XR |
| H0194 | Human Cerebellum, subtracted | Human Cerebellum | Brain | | | pBLUESCRIPT ™ |
| H0201 | Human Hippocampus, subtracted | Human Hippocampus | Brain | | | pBLUESCRIPT ™ |
| H0204 | Human Colon Cancer, subtracted | Human Colon Cancer | Colon | | | pBLUESCRIPT ™ |
| H0207 | LNCAP, differential expression | LNCAP Cell Line | Prostate | Cell Line | | pBLUESCRIPT ™ |
| H0208 | Early Stage Human Lung, subtracted | Human Fetal Lung | Lung | | | pBLUESCRIPT ™ |
| H0211 | Human Prostate, differential expression | Human Prostate | Prostate | | | pBLUESCRIPT ™ |
| H0212 | Human Prostate, subtracted | Human Prostate | Prostate | | | pBLUESCRIPT ™ |
| H0213 | Human Pituitary, subtracted | Human Pituitary | | | | Uni-ZAP XR |
| H0214 | Raji cells, cyclohexamide treated, subtracted | Cyclohexamide Treated Cem, Jurkat, Raji, and Supt | Blood | Cell Line | | pBLUESCRIPT ™ |
| H0222 | Activated T-Cells, 8 hrs, subtracted | Activated T-Cells | Blood | Cell Line | | Uni-ZAP XR |
| H0230 | Human Cardiomyopathy, diff exp | Human Cardiomyopathy | Heart | | disease | Uni-ZAP XR |
| H0231 | Human Colon, subtraction | Human Colon | | | | pBLUESCRIPT ™ |
| H0232 | Human Colon, differential expression | Human Colon | | | | pBLUESCRIPT ™ |
| H0235 | Human colon cancer, metaticized to liver, subtraction | Human Colon Cancer, metasticized to liver | Liver | | | pBLUESCRIPT ™ |
| H0239 | Human Kidney Tumor | Human Kidney Tumor | Kidney | | disease | Uni-ZAP XR |
| H0240 | C7MCF7 cell line, estrogen treated, Differential | C7MCF7 Cell Line, estrogen treated | Breast | Cell Line | | Uni-ZAP XR |
| H0244 | Human 8 Week Whole Embryo, subtracted | Human 8 Week Old Embryo | Embryo | | | Uni-ZAP XR |
| H0250 | Human Activated Monocytes | Human Monocytes | | | | Uni-ZAP XR |
| H0251 | Human Chondrosarcoma | Human Chondrosarcoma | Cartilage | | disease | Uni-ZAP XR |
| H0252 | Human Osteosarcoma | Human Osteosarcoma | Bone | | disease | Uni-ZAP XR |
| H0253 | Human adult testis, large inserts | Human Adult Testis | Testis | | | Uni-ZAP XR |
| H0254 | Breast Lymph node cDNA library | Breast Lymph Node | Lymph Node | | | Uni-ZAP XR |
| H0255 | breast lymph node CDNA library | Breast Lymph Node | Lymph Node | | | Lambda ZAP II |
| H0261 | H. cerebellum, Enzyme subtracted | Human Cerebellum | Brain | | | Uni-ZAP XR |
| H0263 | human colon cancer | Human Colon Cancer | Colon | | disease | Lambda ZAP II |
| H0264 | human tonsils | Human Tonsil | Tonsil | | | Uni-ZAP XR |
| H0265 | Activated T-Cell (12 hs)/Thiouridine labelledEco | T-Cells | Blood | Cell Line | | Uni-ZAP XR |
| H0266 | Human Microvascular Endothelial Cells, fract. A | HMEC | Vein | Cell Line | | Lambda ZAP II |
| H0267 | Human Microvascular Endothelial Cells, fract. B | HMEC | Vein | Cell Line | | Lambda ZAP II |
| H0268 | Human Umbilical Vein Endothelial Cells, fract. A | HUVE Cells | Umbilical vein | Cell Line | | Lambda ZAP II |
| H0269 | Human Umbilical Vein Endothelial Cells, fract. B | HUVE Cells | Umbilical vein | Cell Line | | Lambda ZAP II |
| H0271 | Human Neutrophil, Activated | Human Neutrophil - Activated | Blood | Cell Line | | Uni-ZAP XR |
| H0272 | HUMAN TONSILS, FRACTION 2 | Human Tonsil | Tonsil | | | Uni-ZAP XR |
| H0286 | Human OB MG63 treated (10 nM E2) fraction I | Human Osteoblastoma MG63 cell line | Bone | Cell Line | | Uni-ZAP XR |
| H0288 | Human OB HOS control fraction I | Human Osteoblastoma HOS cell line | Bone | Cell Line | | Uni-ZAP XR |
| H0290 | Human OB HOS treated (1 nM E2) fraction I | Human Osteoblastoma HOS cell line | Bone | Cell Line | | Uni-ZAP XR |
| H0292 | Human OB HOS treated (10 nM E2) fraction I | Human Osteoblastoma HOS cell line | Bone | Cell Line | | Uni-ZAP XR |
| H0293 | WI 38 cells | | | | | Uni-ZAP XR |
| H0294 | Amniotic Cells - TNF induced | Amniotic Cells - TNF induced | Placenta | Cell Line | | Uni-ZAP XR |
| H0295 | Amniotic Cells - Primary Culture | Amniotic Cells - Primary Culture | Placenta | Cell Line | | Uni-ZAP XR |
| H0305 | CD34 positive cells (Cord Blood) | CD34 Positive Cells | Cord Blood | | | ZAP Express |
| H0306 | CD34 depleted Buffy Coat (Cord Blood) | CD34 Depleted Buffy Coat (Cord Blood) | Cord Blood | | | ZAP Express |
| H0309 | Human Chronic Synovitis | Synovium, Chronic Synovitis/Osteoarthritis | Synovium | | disease | Uni-ZAP XR |
| H0318 | HUMAN B CELL LYMPHOMA | Human B Cell Lymphoma | Lymph Node | | disease | Uni-ZAP XR |
| H0320 | Human frontal cortex | Human Frontal Cortex | Brain | | | Uni-ZAP XR |
| H0321 | HUMAN SCHWANOMA | Schwanoma | Nerve | | disease | Uni-ZAP XR |
| H0327 | human corpus colosum | Human Corpus Callosum | Brain | | | Uni-ZAP XR |
| H0328 | human ovarian cancer | Ovarian Cancer | Ovary | | disease | Uni-ZAP XR |
| H0329 | Dermatofibrosarcoma Protuberance | Dermatofibrosarcoma Protuberans | Skin | | disease | Uni-ZAP XR |
| H0331 | Hepatocellular Tumor | Hepatocellular Tumor | Liver | | disease | Lambda ZAP II |
| H0333 | Hemangiopericytoma | Hemangiopericytoma | Blood vessel | | disease | Lambda ZAP II |
| H0334 | Kidney cancer | Kidney Cancer | Kidney | | disease | Uni-ZAP XR |
| H0341 | Bone Marrow Cell Line (RS4; 11) | Bone Marrow Cell Line RS4; 11 | Bone Marrow | Cell Line | | Uni-ZAP XR |
| H0351 | Glioblastoma | Glioblastoma | Brain | | disease | Uni-ZAP XR |
| H0352 | wilm''s tumor | Wilm''s Tumor | | | disease | Uni-ZAP XR |
| H0354 | Human Leukocytes | Human Leukocytes | Blood | Cell Line | | pCMVSport 1 |
| H0355 | Human Liver | Human Liver, normal Adult | | | | pCMVSport 1 |
| H0356 | Human Kidney | Human Kidney | Kidney | | | pCMVSport 1 |
| H0357 | H. Normalized Fetal Liver, II | Human Fetal Liver | Liver | | | Uni-ZAP XR |
| H0369 | H. Atrophic Endometrium | Atrophic Endometrium and myometrium | | | | Uni-ZAP XR |
| H0370 | H. Lymph node breast Cancer | Lymph node with Met. Breast Cancer | | | disease | Uni-ZAP XR |
| H0371 | Eosinophils-Hypereosinophilia patient | Eosinophils-Hypereosinophilia patient | | | disease | Uni-ZAP XR |
| H0373 | Human Heart | Human Adult Heart | Heart | | | pCMVSport 1 |
| H0374 | Human Brain | Human Brain | | | | pCMVSport 1 |
| H0375 | Human Lung | Human Lung | | | | pCMVSport 1 |
| H0379 | Human Tongue, frac 1 | Human Tongue | | | | pSport1 |
| H0380 | Human Tongue, frac 2 | Human Tongue | | | | pSport1 |
| H0383 | Human Prostate BPH, re-excision | Human Prostate BPH | | | | Uni-ZAP XR |
| H0384 | Brain, Kozak | Human Brain | | | | pCMVSport 1 |
| H0391 | H. Meniingima, M6 | Human Meningima | brain | | | pSport1 |
| H0392 | H. Meningima, M1 | Human Meningima | brain | | | pSport1 |
| H0393 | Fetal Liver, subtraction II | Human Fetal Liver | Liver | | | pBLUESCRIPT ™ |
| H0394 | A-14 cell line | Redd-Sternberg cell | | | | ZAP Express |
| H0402 | CD34 depleted Buffy Coat (Cord Blood), reexcision | CD34 Depleted Buffy Coat (Cord Blood) | Cord Blood | | | ZAP Express |
| H0403 | H. Umbilical Vein Endothelial Cells, IL4 induced | HUVE Cells | Umbilical vein | Cell Line | | Uni-ZAP XR |
| H0404 | H. Umbilical Vein endothelial cells, uninduced | HUVE Cells | Umbilical vein | Cell Line | | Uni-ZAP XR |
| H0405 | Human Pituitary, subtracted VI | Human Pituitary | | | | pBLUESCRIPT ™ |
| H0408 | Human kidney Cortex, subtracted | Human Kidney Cortex | | | | pBLUESCRIPT ™ |
| H0409 | H. Striatum Depression, subtracted | Human Brain, Striatum Depression | Brain | | | pBLUESCRIPT ™ |
| H0411 | H Female Bladder, Adult | Human Female Adult Bladder | Bladder | | | pSport1 |
| H0412 | Human umbilical vein endothelial cells, IL-4 | HUVE Cells | Umbilical vein | Cell Line | | pSport1 |
| | induced | | | | | |
| H0413 | Human Umbilical Vein Endothelial Cells, uninduced | HUVE Cells | Umbilical vein | Cell Line | | pSport1 |
| H0414 | Ovarian Tumor I, OV5232 | Ovarian Tumor, OV5232 | Ovary | | disease | pSport1 |
| H0415 | H. Ovarian Tumor, II, OV5232 | Ovarian Tumor, OV5232 | Ovary | | disease | pCMVSport 2.0 |
| H0416 | Human Neutrophils, Activated, re-excision | Human Neutrophil - Activated | Blood | Cell Line | | pBLUESCRIPT ™ |
| H0417 | Human Pituitary, subtracted VIII | Human Pituitary | | | | pBLUESCRIPT ™ |
| H0419 | Bone Cancer, re-excision | Bone Cancer | | | | Uni-ZAP XR |
| H0421 | Human Bone Marrow, re-excision | Bone Marrow | | | | pBLUESCRIPT ™ |
| H0422 | T-Cell PHA 16 hrs | T-Cells | Blood | Cell Line | | pSport1 |
| H0423 | T-Cell PHA 24 hrs | T-Cells | Blood | Cell Line | | pSport1 |
| H0424 | Human Pituitary, subt IX | Human Pituitary | | | | pBLUESCRIPT ™ |
| H0427 | Human Adipose | Human Adipose, left hiplipoma | | | | pSport1 |
| H0428 | Human Ovary | Human Ovary Tumor | Ovary | | | pSport1 |
| H0429 | K562 + PMA (36 hrs), re-excision | K562 Cell line | cell line | Cell Line | | ZAP Express |
| H0431 | H. Kidney Medulla, re-excision | Kidney medulla | Kidney | | | pBLUESCRIPT ™ |
| H0433 | Human Umbilical Vein Endothelial cells, frac B, re- | HUVE Cells | Umbilical vein | Cell Line | | pBLUESCRIPT ™ |
| | excision | | | | | |
| H0434 | Human Brain, striatum, re-excision | Human Brain, Striatum | | | | pBLUESCRIPT ™ |
| H0435 | Ovarian Tumor 10-3-95 | Ovarian Tumor, OV350721 | Ovary | | | pCMVSport 2.0 |
| H0436 | Resting T-Cell Library, II | T-Cells | Blood | Cell Line | | pSport1 |
| H0437 | H Umbilical Vein Endothelial Cells, frac A, re- | HUVE Cells | Umbilical vein | Cell Line | | Lambda ZAP II |
| | excision | | | | | |
| H0438 | H. Whole Brain #2, re-excision | Human Whole Brain #2 | | | | ZAP Express |
| H0441 | H. Kidney Cortex, subtracted | Kidney cortex | Kidney | | | pBLUESCRIPT ™ |
| H0443 | H. Adipose, subtracted | Human Adipose, left hiplipoma | | | | pSport1 |
| H0444 | Spleen metastic melanoma | Spleen, Metastic malignant melanoma | Spleen | | disease | pSport1 |
| H0445 | Spleen, Chronic lymphocytic leukemia | Human Spleen, CLL | Spleen | | disease | pSport1 |
| H0455 | H. Striatum Depression, subt | Human Brain, Striatum Depression | Brain | | | pBLUESCRIPT ™ |
| H0457 | Human Eosinophils | Human Eosinophils | | | | pSport1 |
| H0458 | CD34+ cell, I, frac II | CD34 positive cells | | | | pSport1 |
| H0477 | Human Tonsil, Lib 3 | Human Tonsil | Tonsil | | | pSport1 |
| H0478 | Salivary Gland, Lib 2 | Human Salivary Gland | Salivary gland | | | pSport1 |
| H0479 | Salivary Gland, Lib 3 | Human Salivary Gland | Salivary gland | | | pSport1 |
| H0483 | Breast Cancer cell line, MDA 36 | Breast Cancer Cell line, MDA 36 | | | | pSport1 |
| H0484 | Breast Cancer Cell line, angiogenic | Breast Cancer Cell line, Angiogenic, 36T3 | | | | pSport1 |
| H0485 | Hodgkin''s Lymphoma I | Hodgkin''s Lymphoma I | | | disease | pCMVSport 2.0 |
| H0486 | Hodgkin''s Lymphoma II | Hodgkin''s Lymphoma II | | | disease | pCMVSport 2.0 |
| H0487 | Human Tonsils, lib I | Human Tonsils | | | | pCMVSport 2.0 |
| H0488 | Human Tonsils, Lib 2 | Human Tonsils | | | | pCMVSport 2.0 |
| H0489 | Crohn''s Disease | Ileum | Intestine | | disease | pSport1 |
| H0492 | HL-60, RA 4 h, Subtracted | HL-60 Cells, RA stimulated for 4 H | Blood | Cell Line | | Uni-ZAP XR |
| H0494 | Keratinocyte | Keratinocyte | | | | pCMVSport 2.0 |
| H0497 | HEL cell line | HEL cell line | | HEL 92.1.7 | | pSport1 |
| H0505 | Human Astrocyte | Human Astrocyte | | | | pSport1 |
| H0506 | Ulcerative Colitis | Colon | Colon | | | pSport1 |
| H0509 | Liver, Hepatoma | Human Liver, Hepatoma, patient 8 | Liver | | disease | pCMVSport 3.0 |
| H0510 | Human Liver, normal | Human Liver, normal, Patient # 8 | Liver | | | pCMVSport 3.0 |
| H0518 | pBMC stimulated w/poly I/C | pBMC stimulated with poly I/C | | | | pCMVSport 3.0 |
| H0519 | NTERA2, control | NTERA2, Teratocarcinoma cell line | | | | pCMVSport 3.0 |
| H0520 | NTERA2 + retinoic acid, 14 days | NTERA2, Teratocarcinoma cell line | | | | pSport1 |
| H0521 | Primary Dendritic Cells, lib 1 | Primary Dendritic cells | | | | pCMVSport 3.0 |
| H0522 | Primary Dendritic cells, frac 2 | Primary Dendritic cells | | | | pCMVSport 3.0 |
| H0529 | Myoloid Progenitor Cell Line | TF-1 Cell Line; Myoloid progenitor cell line | | | | pCMVSport 3.0 |
| H0530 | Human Dermal Endothelial Cells, untreated | Human Dermal Endothelial Cells; untreated | | | | pSport1 |
| H0538 | Merkel Cells | Merkel cells | Lymph node | | | pSport1 |
| H0539 | Pancreas Islet Cell Tumor | Pancreas Islet Cell Tumour | Pancreas | | disease | pSport1 |
| H0542 | T Cell helper I | Helper T cell | | | | pCMVSport 3.0 |
| H0543 | T cell helper II | Helper T cell | | | | pCMVSport 3.0 |
| H0544 | Human endometrial stromal cells | Human endometrial stromal cells | | | | pCMVSport 3.0 |
| H0545 | Human endometrial stromal cells-treated with | Human endometrial stromal cells-treated with proge | | | | pCMVSport 3.0 |
| | progesterone | | | | | |
| H0546 | Human endometrial stromal cells-treated with | Human endometrial stromal cells-treated with estra | | | | pCMVSport 3.0 |
| | estradiol | | | | | |
| H0547 | NTERA2 teratocarcinoma cell line + retinoic acid | NTERA2, Teratocarcinoma cell line | | | | pSport1 |
| | (14 days) | | | | | |
| H0549 | H. Epididiymus, caput & corpus | Human Epididiymus, caput and corpus | | | | Uni-ZAP XR |
| H0550 | H. Epididiymus, cauda | Human Epididiymus, cauda | | | | Uni-ZAP XR |
| H0551 | Human Thymus Stromal Cells | Human Thymus Stromal Cells | | | | pCMVSport 3.0 |
| H0553 | Human Placenta | Human Placenta | | | | pCMVSport 3.0 |
| H0555 | Rejected Kidney, lib 4 | Human Rejected Kidney | Kidney | | disease | pCMVSport 3.0 |
| H0556 | Activated T-cell(12 h)/Thiouridine-re-excision | T-Cells | Blood | Cell Line | | Uni-ZAP XR |
| H0559 | HL-60, PMA 4 H, re-excision | HL-60 Cells, PMA stimulated 4 H | Blood | Cell Line | | Uni-ZAP XR |
| H0560 | KMH2 | KMH2 | | | | pCMVSport 3.0 |
| H0561 | L428 | L428 | | | | pCMVSport 3.0 |
| H0562 | Human Fetal Brain, normalized c5-11-26 | Human Fetal Brain | | | | pCMVSport 2.0 |
| H0563 | Human Fetal Brain, normalized 50021F | Human Fetal Brain | | | | pCMVSport 2.0 |
| H0566 | Human Fetal Brain, normalized c50F | Human Fetal Brain | | | | pCMVSport 2.0 |
| H0569 | Human Fetal Brain, normalized CO | Human Fetal Brain | | | | pCMVSport 2.0 |
| H0570 | Human Fetal Brain, normalized C500H | Human Fetal Brain | | | | pCMVSport 2.0 |
| H0571 | Human Fetal Brain, normalized C500HE | Human Fetal Brain | | | | pCMVSport 2.0 |
| H0572 | Human Fetal Brain, normalized AC5002 | Human Fetal Brain | | | | pCMVSport 2.0 |
| H0574 | Hepatocellular Tumor; re-excision | Hepatocellular Tumor | Liver | | disease | Lambda ZAP II |
| H0575 | Human Adult Pulmonary; re-excision | Human Adult Pulmonary | Lung | | | Uni-ZAP XR |
| H0576 | Resting T-Cell; re-excision | T-Cells | Blood | Cell Line | | Lambda ZAP II |
| H0580 | Dendritic cells, pooled | Pooled dendritic cells | | | | pCMVSport 3.0 |
| H0581 | Human Bone Marrow, treated | Human Bone Marrow | Bone Marrow | | | pCMVSport 3.0 |
| H0583 | B Cell lymphoma | B Cell Lymphoma | B Cell | | disease | pCMVSport 3.0 |
| H0585 | Activated T-Cells, 12 hrs, re-excision | Activated T-Cells | Blood | Cell Line | | Uni-ZAP XR |
| H0586 | Healing groin wound, 6.5 hours post incision | healing groin wound, 6.5 hours post incision - 2/ | groin | | disease | pCMVSport 3.0 |
| H0587 | Healing groin wound; 7.5 hours post incision | Groin-Feb. 19, 1997 | groin | | disease | pCMVSport 3.0 |
| H0589 | CD34 positive cells (cord blood), re-ex | CD34 Positive Cells | Cord Blood | | | ZAP Express |
| H0590 | Human adult small intestine, re-excision | Human Adult Small Intestine | Small Int. | | | Uni-ZAP XR |
| H0591 | Human T-cell lymphoma; re-excision | T-Cell Lymphoma | T-Cell | | disease | Uni-ZAP XR |
| H0592 | Healing groin wound-zero hr post-incision | HGS wound healing project; abdomen | | | disease | pCMVSport 3.0 |
| | (control) | | | | | |
| H0593 | Olfactory epithelium; nasalcavity | Olfactory epithelium from roof of left nasal cacit | | | | pCMVSport 3.0 |
| H0594 | Human Lung Cancer; re-excision | Human Lung Cancer | Lung | | disease | Lambda ZAP II |
| H0595 | Stomach cancer (human); re-excision | Stomach Cancer-5383A (human) | | | disease | Uni-ZAP XR |
| H0596 | Human Colon Cancer; re-excision | Human Colon Cancer | Colon | | | Lambda ZAP II |
| H0597 | Human Colon; re-excision | Human Colon | | | | Lambda ZAP II |
| H0598 | Human Stomach; re-excision | Human Stomach | Stomach | | | Uni-ZAP XR |
| H0599 | Human Adult Heart; re-excision | Human Adult Heart | Heart | | | Uni-ZAP XR |
| H0600 | Healing Abdomen wound; 70&90 min post incision | Abdomen | | | disease | pCMVSport 3.0 |
| H0601 | Healing Abdomen Wound; 15 days post incision | Abdomen | | | disease | pCMVSport 3.0 |
| H0604 | Human Pituitary, re-excision | Human Pituitary | | | | pBLUESCRIPT ™ |
| H0606 | Human Primary Breast Cancer; re-excision | Human Primary Breast Cancer | Breast | | disease | Uni-ZAP XR |
| H0607 | H. Leukocytes, normalized cot 50A3 | H. Leukocytes | | | | pCMVSport 1 |
| H0615 | Human Ovarian Cancer Reexcision | Ovarian Cancer | Ovary | | disease | Uni-ZAP XR |
| H0616 | Human Testes, Reexcision | Human Testes | Testis | | | Uni-ZAP XR |
| H0617 | Human Primary Breast Cancer Reexcision | Human Primary Breast Cancer | Breast | | disease | Uni-ZAP XR |
| H0618 | Human Adult Testes, Large Inserts, Reexcision | Human Adult Testis | Testis | | | Uni-ZAP XR |
| H0619 | Fetal Heart | Human Fetal Heart | Heart | | | Uni-ZAP XR |
| H0620 | Human Fetal Kidney; Reexcision | Human Fetal Kidney | Kidney | | | Uni-ZAP XR |
| H0622 | Human Pancreas Tumor; Reexcision | Human Pancreas Tumor | Pancreas | | disease | Uni-ZAP XR |
| H0623 | Human Umbilical Vein; Reexcision | Human Umbilical Vein Endothelial Cells | Umbilical vein | | | Uni-ZAP XR |
| H0624 | 12 Week Early Stage Human II; Reexcision | Twelve Week Old Early Stage Human | Embryo | | | Uni-ZAP XR |
| H0625 | Ku 812F Basophils Line | Ku 812F Basophils | | | | pSport1 |
| H0627 | Saos2 Cells; Vitamin D3 Treated | Saos2 Cell Line; Vitamin D3 Treated | | | | pSport1 |
| H0628 | Human Pre-Differentiated Adipocytes | Human Pre-Differentiated Adipocytes | | | | Uni-ZAP XR |
| H0629 | Human Leukocyte, control #2 | Human Normalized leukocyte | | | | pCMVSport 1 |
| H0631 | Saos2, Dexamethosome Treated | Saos2 Cell Line; Dexamethosome Treated | | | | pSport1 |
| H0632 | Hepatocellular Tumor; re-excision | Hepatocellular Tumor | Liver | | | Lambda ZAP II |
| H0633 | Lung Carcinoma A549 TNFalpha activated | TNFalpha activated A549--Lung Carcinoma | | | disease | pSport1 |
| H0634 | Human Testes Tumor, re-excision | Human Testes Tumor | Testis | | disease | Uni-ZAP XR |
| H0635 | Human Activated T-Cells, re-excision | Activated T-Cells | Blood | Cell Line | | Uni-ZAP XR |
| H0637 | Dendritic Cells From CD34 Cells | Dentritic cells from CD34 cells | | | | pSport1 |
| H0638 | CD40 activated monocyte dendridic cells | CD40 activated monocyte dendridic cells | | | | pSport1 |
| H0640 | Ficolled Human Stromal Cells, Untreated | Ficolled Human Stromal Cells, Untreated | | | | Other |
| H0641 | LPS activated derived dendritic cells | LPS activated monocyte derived dendritic cells | | | | pSport1 |
| H0642 | Hep G2 Cells, lambda library | Hep G2 Cells | | | | Other |
| H0643 | Hep G2 Cells, PCR library | Hep G2 Cells | | | | Other |
| H0644 | Human Placenta (re-excision) | Human Placenta | Placenta | | | Uni-ZAP XR |
| H0645 | Fetal Heart, re-excision | Human Fetal Heart | Heart | | | Uni-ZAP XR |
| H0646 | Lung, Cancer (4005313 A3): Invasive Poorly | Metastatic squamous cell lung carcinoma, poorly di | | | | pSport1 |
| | Differentiated Lung Adenocarcinoma, | | | | | |
| H0647 | Lung, Cancer (4005163 B7): Invasive, Poorly Diff. | Invasive poorly differentiated lung adenocarcinoma | | | disease | pSport1 |
| | Adenocarcinoma, Metastatic | | | | | |
| H0648 | Ovary, Cancer: (4004562 B6) Papillary Serous | Papillary Cstic neoplasm of low malignant potentia | | | disease | pSport1 |
| | Cystic Neoplasm, Low Malignant Pot | | | | | |
| H0649 | Lung, Normal: (4005313 B1) | Normal Lung | | | | pSport1 |
| H0650 | B-Cells | B-Cells | | | | pCMVSport 3.0 |
| H0651 | Ovary, Normal: (9805C040R) | Normal Ovary | | | | pSport1 |
| H0652 | Lung, Normal: (4005313 B1) | Normal Lung | | | | pSport1 |
| H0653 | Stromal Cells | Stromal Cells | | | | pSport1 |
| H0656 | B-cells (unstimulated) | B-cells (unstimulated) | | | | pSport1 |
| H0657 | B-cells (stimulated) | B-cells (stimulated) | | | | pSport1 |
| H0658 | Ovary, Cancer (9809C332): Poorly differentiated | 9809C332-Poorly differentiate | Ovary & Fallopian | | disease | pSport1 |
| | adenocarcinoma | | Tubes | | | |
| H0659 | Ovary, Cancer (15395A1F): Grade II Papillary | Grade II Papillary Carcinoma, Ovary | Ovary | | disease | pSport1 |
| | Carcinoma | | | | | |
| H0660 | Ovary, Cancer: (15799A1F) Poorly differentiated | Poorly differentiated carcinoma, ovary | | | disease | pSport1 |
| | carcinoma | | | | | |
| H0661 | Breast, Cancer: (4004943 A5) | Breast cancer | | | disease | pSport1 |
| H0662 | Breast, Normal: (4005522B2) | Normal Breast - #4005522(B2) | Breast | | | pSport1 |
| H0663 | Breast, Cancer: (4005522 A2) | Breast Cancer - #4005522(A2) | Breast | | disease | pSport1 |
| H0664 | Breast, Cancer: (9806C012R) | Breast Cancer | Breast | | disease | pSport1 |
| H0665 | Stromal cells 3.88 | Stromal cells 3.88 | | | | pSport1 |
| H0666 | Ovary, Cancer: (4004332 A2) | Ovarian Cancer, Sample #4004332A2 | | | disease | pSport1 |
| H0667 | Stromal cells(HBM3.18) | Stromal cell(HBM 3.18) | | | | pSport1 |
| H0668 | stromal cell clone 2.5 | stromal cell clone 2.5 | | | | pSport1 |
| H0670 | Ovary, Cancer(4004650 A3): Well-Differentiated | Ovarian Cancer - 4004650A3 | | | | pSport1 |
| | Micropapillary Serous Carcinoma | | | | | |
| H0672 | Ovary, Cancer: (4004576 A8) | Ovarian Cancer(4004576A8) | Ovary | | | pSport1 |
| H0673 | Human Prostate Cancer, Stage B2; re-excision | Human Prostate Cancer, stage B2 | Prostate | | | Uni-ZAP XR |
| H0674 | Human Prostate Cancer, Stage C; re-excission | Human Prostate Cancer, stage C | Prostate | | | Uni-ZAP XR |
| H0677 | TNFR degenerate oligo | B-Cells | | | | PCRII |
| H0678 | screened clones from placental library | Placenta | Placenta | | | Other |
| H0682 | Serous Papillary Adenocarcinoma | serous papillary adenocarcinoma | | | | pCMVSport 3.0 |
| | | (9606G304SPA3B) | | | | |
| H0684 | Serous Papillary Adenocarcinoma | Ovarian Cancer-9810G606 | Ovaries | | | pCMVSport 3.0 |
| H0685 | Adenocarcinoma of Ovary, Human Cell Line, # | Adenocarcinoma of Ovary, Human Cell Line, # | | | | pCMVSport 3.0 |
| | OVCAR-3 | OVCAR- | | | | |
| H0686 | Adenocarcinoma of Ovary, Human Cell Line | Adenocarcinoma of Ovary, Human Cell Line, # | | | | pCMVSport 3.0 |
| | | SW-626 | | | | |
| H0687 | Human normal ovary(#9610G215) | Human normal ovary(#9610G215) | Ovary | | | pCMVSport 3.0 |
| H0688 | Human Ovarian Cancer(#9807G017) | Human Ovarian cancer(#9807G017), mRNA from | | | | pCMVSport 3.0 |
| | | Maura Ru | | | | |
| H0689 | Ovarian Cancer | Ovarian Cancer, #9806G019 | | | | pCMVSport 3.0 |
| H0690 | Ovarian Cancer, # 9702G001 | Ovarian Cancer, #9702G001 | | | | pCMVSport 3.0 |
| H0693 | Normal Prostate #ODQ3958EN | Normal Prostate Tissue # ODQ3958EN | | | | pCMVSport 3.0 |
| S0001 | Brain frontal cortex | Brain frontal cortex | Brain | | | Lambda ZAP II |
| S0002 | Monocyte activated | Monocyte-activated | blood | Cell Line | | Uni-ZAP XR |
| S0003 | Human Osteoclastoma | Osteoclastoma | bone | | disease | Uni-ZAP XR |
| S0007 | Early Stage Human Brain | Human Fetal Brain | | | | Uni-ZAP XR |
| S0010 | Human Amygdala | Amygdala | | | | Uni-ZAP XR |
| S0011 | STROMAL-OSTEOCLASTOMA | Osteoclastoma | bone | | disease | Uni-ZAP XR |
| S0014 | Kidney Cortex | Kidney cortex | Kidney | | | Uni-ZAP XR |
| S0015 | Kidney medulla | Kidney medulla | Kidney | | | Uni-ZAP XR |
| S0016 | Kidney Pyramids | Kidney pyramids | Kidney | | | Uni-ZAP XR |
| S0022 | Human Osteoclastoma Stromal Cells - unamplified | Osteoclastoma Stromal Cells | | | | Uni-ZAP XR |
| S0023 | Human Kidney Cortex - unamplified | Human Kidney Cortex | | | | |
| S0026 | Stromal cell TF274 | stromal cell | Bone marrow | Cell Line | | Uni-ZAP XR |
| S0027 | Smooth muscle, serum treated | Smooth muscle | Pulmanary artery | Cell Line | | Uni-ZAP XR |
| S0028 | Smooth muscle, control | Smooth muscle | Pulmanary artery | Cell Line | | Uni-ZAP XR |
| S0030 | Brain pons | Brain Pons | Brain | | | Uni-ZAP XR |
| S0031 | Spinal cord | Spinal cord | spinal cord | | | Uni-ZAP XR |
| S0032 | Smooth muscle-ILb induced | Smooth muscle | Pulmanary artery | Cell Line | | Uni-ZAP XR |
| S0035 | Brain medulla oblongata | Brain medulla oblongata | Brain | | | Uni-ZAP XR |
| S0036 | Human Substantia Nigra | Human Substantia Nigra | | | | Uni-ZAP XR |
| S0037 | Smooth muscle, IL1b induced | Smooth muscle | Pulmanary artery | Cell Line | | Uni-ZAP XR |
| S0038 | Human Whole Brain #2 - Oligo dT > 1.5 Kb | Human Whole Brain #2 | | | | ZAP Express |
| S0040 | Adipocytes | Human Adipocytes from Osteoclastoma | | | | Uni-ZAP XR |
| S0042 | Testes | Human Testes | | | | ZAP Express |
| S0044 | Prostate BPH | prostate BPH | Prostate | | disease | Uni-ZAP XR |
| S0045 | Endothelial cells-control | Endothelial cell | endothelial cell- | Cell Line | | Uni-ZAP XR |
| | | | lung | | | |
| S0046 | Endothelial-induced | Endothelial cell | endothelial cell- | Cell Line | | Uni-ZAP XR |
| | | | lung | | | |
| S0049 | Human Brain, Striatum | Human Brain, Striatum | | | | Uni-ZAP XR |
| S0050 | Human Frontal Cortex, Schizophrenia | Human Frontal Cortex, Schizophrenia | | | disease | Uni-ZAP XR |
| S0051 | Human Hypothalmus, Schizophrenia | Human Hypothalamus, Schizophrenia | | | disease | Uni-ZAP XR |
| S0052 | neutrophils control | human neutrophils | blood | Cell Line | | Uni-ZAP XR |
| S0053 | Neutrophils IL-1 and LPS induced | human neutrophil induced | blood | Cell Line | | Uni-ZAP XR |
| S0110 | Brain Amygdala Depression | | Brain | | disease | Uni-ZAP XR |
| S0112 | Hypothalamus | | Brain | | | Uni-ZAP XR |
| S0114 | Anergic T-cell | Anergic T-cell | | Cell Line | | Uni-ZAP XR |
| S0116 | Bone marrow | Bone marrow | Bone marrow | | | Uni-ZAP XR |
| S0122 | Osteoclastoma-normalized A | Osteoclastoma | bone | | disease | pBLUESCRIPT ™ |
| S0126 | Osteoblasts | Osteoblasts | Knee | Cell Line | | Uni-ZAP XR |
| S0132 | Epithelial-TNFa and INF induced | Airway Epithelial | | | | Uni-ZAP XR |
| S0134 | Apoptotic T-cell | apoptotic cells | | Cell Line | | Uni-ZAP XR |
| S0136 | PERM TF274 | stromal cell | Bone marrow | Cell Line | | Lambda ZAP II |
| S0140 | eosinophil-IL5 induced | eosinophil | lung | Cell Line | | Uni-ZAP XR |
| S0142 | Macrophage-oxLDL | macrophage-oxidized LDL treated | blood | Cell Line | | Uni-ZAP XR |
| S0144 | Macrophage (GM-CSF treated) | Macrophage (GM-CSF treated) | | | | Uni-ZAP XR |
| S0146 | prostate-edited | prostate BPH | Prostate | | | Uni-ZAP XR |
| S0148 | Normal Prostate | Prostate | prostate | | | Uni-ZAP XR |
| S0150 | LNCAP prostate cell line | LNCAP Cell Line | Prostate | Cell Line | | Uni-ZAP XR |
| S0152 | PC3 Prostate cell line | PC3 prostate cell line | | | | Uni-ZAP XR |
| S0176 | Prostate, normal, subtraction I | Prostate | prostate | | | Uni-ZAP XR |
| S0180 | Bone Marrow Stroma, TNF&LPS ind | Bone Marrow Stroma, TNF & LPS induced | | | disease | Uni-ZAP XR |
| S0182 | Human B Cell 8866 | Human B-Cell 8866 | | | | Uni-ZAP XR |
| S0188 | Prostate, BPH, Lib 2 | Human Prostate BPH | | | disease | pSport1 |
| S0192 | Synovial Fibroblasts (control) | Synovial Fibroblasts | | | | pSport1 |
| S0194 | Synovial hypoxia | Synovial Fibroblasts | | | | pSport1 |
| S0196 | Synovial IL-1/TNF stimulated | Synovial Fibroblasts | | | | pSport1 |
| S0206 | Smooth Muscle-HASTE normalized | Smooth muscle | Pulmanary artery | Cell Line | | pBLUESCRIPT ™ |
| S0210 | Messangial cell, frac 2 | Messangial cell | | | | pSport1 |
| S0212 | Bone Marrow Stromal Cell, untreated | Bone Marrow Stromal Cell, untreated | | | | pSport1 |
| S0214 | Human Osteoclastoma, re-excision | Osteoclastoma | bone | | disease | Uni-ZAP XR |
| S0216 | Neutrophils IL-1 and LPS induced | human neutrophil induced | blood | Cell Line | | Uni-ZAP XR |
| S0218 | Apoptotic T-cell, re-excision | apoptotic cells | | Cell Line | | Uni-ZAP XR |
| S0222 | H. Frontal cortex, epileptic; re-excision | H. Brain, Frontal Cortex, Epileptic | Brain | | disease | Uni-ZAP XR |
| S0242 | Synovial Fibroblasts (IIl/TNF), subt | Synovial Fibroblasts | | | | pSport1 |
| S0250 | Human Osteoblasts II | Human Osteoblasts | Femur | | disease | pCMVSport 2.0 |
| S0260 | Spinal Cord, re-excision | Spinal cord | spinal cord | | | Uni-ZAP XR |
| S0276 | Synovial hypoxia-RSF subtracted | Synovial fobroblasts (rheumatoid) | Synovial tissue | | | pSport1 |
| S0278 | H Macrophage (GM-CSF treated), re-excision | Macrophage (GM-CSF treated) | | | | Uni-ZAP XR |
| S0280 | Human Adipose Tissue, re-excision | Human Adipose Tissue | | | | Uni-ZAP XR |
| S0282 | Brain Frontal Cortex, re-excision | Brain frontal cortex | Brain | | | Lambda ZAP II |
| S0292 | Osteoarthritis (OA-4) | Human Osteoarthritic Cartilage | Bone | | disease | pSport1 |
| S0294 | Larynx tumor | Larynx tumor | Larynx, vocal cord | | disease | pSport1 |
| S0298 | Bone marrow stroma, treated | Bone marrow stroma, treatedSB | Bone marrow | | | pSport1 |
| S0300 | Frontal lobe, dementia; re-excision | Frontal Lobe dementia/Alzheimer''s | Brain | | | Uni-ZAP XR |
| S0306 | Larynx normal #10 261-273 | Larynx normal | | | | pSport1 |
| S0312 | Human osteoarthritic; fraction II | Human osteoarthritic cartilage | | | disease | pSport1 |
| S0314 | Human osteoarthritis; fraction I | Human osteoarthritic cartilage | | | disease | pSport1 |
| S0316 | Human Normal Cartilage, Fraction I | Human Normal Cartilage | | | | pSport1 |
| S0318 | Human Normal Cartilage Fraction II | Human Normal Cartilage | | | | pSport1 |
| S0328 | Palate carcinoma | Palate carcinoma | Uvula | | disease | pSport1 |
| S0330 | Palate normal | Palate normal | Uvula | | | pSport1 |
| S0334 | Human Normal Cartilage Fraction III | Human Normal Cartilage | | | | pSport1 |
| S0338 | Human Osteoarthritic Cartilage Fraction III | Human osteoarthritic cartilage | | | disease | pSport1 |
| S0340 | Human Osteoarthritic Cartilage Fraction IV | Human osteoarthritic cartilage | | | disease | pSport1 |
| S0342 | Adipocytes; re-excision | Human Adipocytes from Osteoclastoma | | | | Uni-ZAP XR |
| S0344 | Macrophage-oxLDL; re-excision | macrophage-oxidized LDL treated | blood | Cell Line | | Uni-ZAP XR |
| S0346 | Human Amygdala; re-excision | Amygdala | | | | Uni-ZAP XR |
| S0354 | Colon Normal II | Colon Normal | Colon | | | pSport1 |
| S0356 | Colon Carcinoma | Colon Carcinoma | Colon | | disease | pSport1 |
| S0358 | Colon Normal III | Colon Normal | Colon | | | pSport1 |
| S0360 | Colon Tumor II | Colon Tumor | Colon | | disease | pSport1 |
| S0362 | Human Gastrocnemius | Gastrocnemius muscle | | | | pSport1 |
| S0364 | Human Quadriceps | Quadriceps muscle | | | | pSport1 |
| S0366 | Human Soleus | Soleus Muscle | | | | pSport1 |
| S0368 | Human Pancreatic Langerhans | Islets of Langerhans | | | | pSport1 |
| S0372 | Larynx carcinoma III | Larynx carcinoma | | | disease | pSport1 |
| S0374 | Normal colon | Normal colon | | | | pSport1 |
| S0376 | Colon Tumor | Colon Tumor | | | disease | pSport1 |
| S0378 | Pancreas normal PCA4 No | Pancreas Normal PCA4 No | | | | pSport1 |
| S0380 | Pancreas Tumor PCA4 Tu | Pancreas Tumor PCA4 Tu | | | disease | pSport1 |
| S0382 | Larynx carcinoma IV | Larynx carcinoma | | | disease | pSport1 |
| S0386 | Human Whole Brain, re-excision | Whole brain | Brain | | | ZAP Express |
| S0388 | Human Hypothalamus, schizophrenia, re-excision | Human Hypothalamus, Schizophrenia | | | disease | Uni-ZAP XR |
| S0390 | Smooth muscle, control; re-excision | Smooth muscle | Pulmanary artery | Cell Line | | Uni-ZAP XR |
| S0392 | Salivary Gland | Salivary gland; normal | | | | pSport1 |
| S0394 | Stomach; normal | Stomach; normal | | | | pSport1 |
| S0398 | Testis; normal | Testis; normal | | | | pSport1 |
| S0402 | Adrenal Gland, normal | Adrenal gland; normal | | | | pSport1 |
| S0404 | Rectum normal | Rectum, normal | | | | pSport1 |
| S0406 | Rectum tumour | Rectum tumour | | | | pSport1 |
| S0408 | Colon, normal | Colon, normal | | | | pSport1 |
| S0410 | Colon, tumour | Colon, tumour | | | | pSport1 |
| S0412 | Temporal cortex-Alzheizmer; subtracted | Temporal cortex, alzheimer | | | disease | Other |
| S0414 | Hippocampus, Alzheimer Subtracted | Hippocampus, Alzheimer Subtracted | | | | Other |
| S0418 | CHME Cell Line; treated 5 hrs | CHME Cell Line; treated | | | | pCMVSport 3.0 |
| S0420 | CHME Cell Line, untreated | CHME Cell line, untreatetd | | | | pSport1 |
| S0422 | Mo7e Cell Line GM-CSF treated (1 ng/ml) | Mo7e Cell Line GM-CSF treated (1 ng/ml) | | | | pCMVSport 3.0 |
| S0424 | TF-1 Cell Line GM-CSF Treated | TF-1 Cell Line GM-CSF Treated | | | | pSport1 |
| S0426 | Monocyte activated; re-excision | Monocyte-activated | blood | Cell Line | | Uni-ZAP XR |
| S0428 | Neutrophils control; re-excision | human neutrophils | blood | Cell Line | | Uni-ZAP XR |
| S0430 | Aryepiglottis Normal | Aryepiglottis Normal | | | | pSport1 |
| S0432 | Sinus piniformis Tumour | Sinus piniformis Tumour | | | | pSport1 |
| S0434 | Stomach Normal | Stomach Normal | | | disease | pSport1 |
| S0436 | Stomach Tumour | Stomach Tumour | | | disease | pSport1 |
| S0438 | Liver Normal Met5No | Liver Normal Met5No | | | | pSport1 |
| S0440 | Liver Tumour Met 5 Tu | Liver Tumour | | | | pSport1 |
| S0442 | Colon Normal | Colon Normal | | | | pSport1 |
| S0444 | Colon Tumor | Colon Tumour | | | disease | pSport1 |
| S0446 | Tongue Tumour | Tongue Tumour | | | | pSport1 |
| S0448 | Larynx Normal | Larynx Normal | | | | pSport1 |
| S0450 | Larynx Tumour | Larynx Tumour | | | | pSport1 |
| S0452 | Thymus | Thymus | | | | pSport1 |
| S0454 | Placenta | Placenta | Placenta | | | pSport1 |
| S0456 | Tongue Normal | Tongue Normal | | | | pSport1 |
| S0458 | Thyroid Normal (SDCA2 No) | Thyroid normal | | | | pSport1 |
| S0460 | Thyroid Tumour | Thyroid Tumour | | | | pSport1 |
| S0462 | Thyroid Thyroiditis | Thyroid Thyroiditis | | | | pSport1 |
| S0466 | Larynx Tumor | Larynx Tumor | | | disease | pSport1 |
| S0474 | Human blood platelets | Platelets | Blood platelets | | | Other |
| S3012 | Smooth Muscle Serum Treated, Norm | Smooth muscle | Pulmanary artery | Cell Line | | pBLUESCRIPT ™ |
| S3014 | Smooth muscle, serum induced, re-exc | Smooth muscle | Pulmanary artery | Cell Line | | pBLUESCRIPT ™ |
| S6016 | H. Frontal Cortex, Epileptic | H. Brain, Frontal Cortex, Epileptic | Brain | | disease | Uni-ZAP XR |
| S6022 | H. Adipose Tissue | Human Adipose Tissue | | | | Uni-ZAP XR |
| S6024 | Alzheimers, spongy change | Alzheimer''s/Spongy change | Brain | | disease | Uni-ZAP XR |
| S6026 | Frontal Lobe, Dementia | Frontal Lobe dementia/Alzheimer''s | Brain | | | Uni-ZAP XR |
| S6028 | Human Manic Depression Tissue | Human Manic depression tissue | Brain | | disease | Uni-ZAP XR |
| T0002 | Activated T-cells | Activated T-Cell, PBL fraction | Blood | Cell Line | | pBLUESCRIPT ™ SK− |
| T0004 | Human White Fat | Human White Fat | | | | pBLUESCRIPT ™ SK− |
| T0006 | Human Pineal Gland | Human Pinneal Gland | | | | pBLUESCRIPT ™ SK− |
| T0008 | Colorectal Tumor | Colorectal Tumor | | | disease | pBLUESCRIPT ™ SK− |
| T0010 | Human Infant Brain | Human Infant Brain | | | | Other |
| T0023 | Human Pancreatic Carcinoma | Human Pancreatic Carcinoma | | | disease | pBLUESCRIPT ™ SK− |
| T0039 | HSA 172 Cells | Human HSA172 cell line | | | | pBLUESCRIPT ™ SK− |
| T0040 | HSC172 cells | SA172 Cells | | | | pBLUESCRIPT ™ SK− |
| T0041 | Jurkat T-cell G1 phase | Jurkat T-cell | | | | pBLUESCRIPT ™ SK− |
| T0042 | Jurkat T-Cell, S phase | Jurkat T-Cell Line | | | | pBLUESCRIPT ™ SK− |
| T0048 | Human Aortic Endothelium | Human Aortic Endothilium | | | | pBLUESCRIPT ™ SK− |
| T0049 | Aorta endothelial cells + TNF-a | Aorta endothelial cells | | | | pBLUESCRIPT ™ SK− |
| T0060 | Human White Adipose | Human White Fat | | | | pBLUESCRIPT ™ SK− |
| T0067 | Human Thyroid | Human Thyroid | | | | pBLUESCRIPT ™ SK− |
| T0068 | Normal Ovary, Premenopausal | Normal Ovary, Premenopausal | | | | pBLUESCRIPT ™ SK− |
| T0069 | Human Uterus, normal | Human Uterus, normal | | | | pBLUESCRIPT ™ SK− |
| T0071 | Human Bone Marrow | Human Bone Marrow | | | | pBLUESCRIPT ™ SK− |
| T0082 | Human Adult Retina | Human Adult Retina | | | | pBLUESCRIPT ™ SK− |
| T0103 | Human colon carcinoma (HCC) cell line | | | | | pBLUESCRIPT ™ SK− |
| T0104 | HCC cell line metastisis to liver | | | | | pBLUESCRIPT ™ SK− |
| T0109 | Human (HCC) cell line liver (mouse) metastasis, | | | | | pBLUESCRIPT ™ SK− |
| | remake | | | | | |
| T0110 | Human colon carcinoma (HCC) cell line, remake | | | | | pBLUESCRIPT ™ SK− |
| T0114 | Human (Caco-2) cell line, adenocarcinoma, colon, | | | | | pBLUESCRIPT ™ SK− |
| | remake | | | | | |
| T0115 | Human Colon Carcinoma (HCC) cell line | | | | | pBLUESCRIPT ™ SK− |
| L0002 | Atrium cDNA library Human heart | | | | | |
| L0005 | CLONTECH ™ human aorta polyA + mRNA | | | | | |
| | (#6572) | | | | | |
| L0015 | Human | | | | | |
| L0021 | Human adult (K. Okubo) | | | | | |
| L0022 | Human adult lung 3″ directed MboI cDNA | | | | | |
| L0040 | Human colon mucosa | | | | | |
| L0045 | Human keratinocyte differential display (B. Lin) | | | | | |
| L0055 | Human promyelocyte | | | | | |
| L0065 | Liver HepG2 cell line. | | | | | |
| L0096 | Subtracted human retina | | | | | |
| L0103 | DKFZphamy1 | amygdala | | | | |
| L0142 | Human placenta cDNA (TFujiwara) | placenta | | | | |
| L0143 | Human placenta polyA + (TFujiwara) | placenta | | | | |
| L0151 | Human testis (C. De Smet) | testis | | | | |
| L0157 | Human fetal brain (TFujiwara) | | brain | | | |
| L0163 | Human heart cDNA (YNakamura) | | heart | | | |
| L0351 | Infant brain, Bento Soares | | | | | BA, M13-derived |
| L0352 | Normalized infant brain, Bento Soares | | | | | BA, M13-derived |
| L0355 | P, Human foetal Brain Whole tissue | | | | | Bluescript |
| L0361 | STRATAGENE ™ ovary (#937217) | | ovary | | | Bluescript SK |
| L0362 | STRATAGENE ™ ovarian cancer (#937219) | | | | | Bluescript SK− |
| L0363 | NCI_CGAP_GC2 | germ cell tumor | | | | Bluescript SK− |
| L0364 | NCI_CGAP_GC5 | germ cell tumor | | | | Bluescript SK− |
| L0365 | NCI_CGAP_Phe1 | pheochromocytoma | | | | Bluescript SK− |
| L0366 | STRATAGENE ™ schizo brain S11 | schizophrenic brain S-11 frontal lobe | | | | Bluescript SK− |
| L0369 | NCI_CGAP_AA1 | adrenal adenoma | adrenal gland | | | Bluescript SK− |
| L0370 | Johnston frontal cortex | pooled frontal lobe | brain | | | Bluescript SK− |
| L0371 | NCI_CGAP_Br3 | breast tumor | breast | | | Bluescript SK− |
| L0372 | NCI_CGAP_Co12 | colon tumor | colon | | | Bluescript SK− |
| L0373 | NCI_CGAP_Co11 | tumor | colon | | | Bluescript SK− |
| L0374 | NCI_CGAP_Co2 | tumor | colon | | | Bluescript SK− |
| L0375 | NCI_CGAP_Kid6 | kidney tumor | kidney | | | Bluescript SK− |
| L0376 | NCI_CGAP_Lar1 | larynx | larynx | | | Bluescript SK− |
| L0378 | NCI_CGAP_Lu1 | lung tumor | lung | | | Bluescript SK− |
| L0379 | NCI_CGAP_Lym3 | lymphoma | lymph node | | | Bluescript SK− |
| L0381 | NCI_CGAP_HN4 | squamous cell carcinoma | pharynx | | | Bluescript SK− |
| L0382 | NCI_CGAP_Pr25 | epithelium (cell line) | prostate | | | Bluescript SK− |
| L0383 | NCI_CGAP_Pr24 | invasive tumor (cell line) | prostate | | | Bluescript SK− |
| L0384 | NCI_CGAP_Pr23 | prostate tumor | prostate | | | Bluescript SK− |
| L0386 | NCI_CGAP_HN3 | squamous cell carcinoma from base of tongue | tongue | | | Bluescript SK− |
| L0387 | NCI_CGAP_GCB0 | germinal center B-cells | tonsil | | | Bluescript SK− |
| L0388 | NCI_CGAP_HN6 | normal gingiva (cell line from immortalized kerati | | | | Bluescript SK− |
| L0415 | b4HB3MA Cot8-HAP-Ft | | | | | Lafmid BA |
| L0434 | Infant brain library of Dr. M. Soares | | | | | lafmid BA |
| L0438 | normalized infant brain cDNA | total brain | brain | | | lafmid BA |
| L0439 | Soares infant brain 1NIB | | whole brain | | | Lafmid BA |
| L0443 | b4HB3MK | | | | | Lafmid BK |
| L0454 | CLONTECH ™ adult human fat cell library | | | | | lambda gt10 |
| | HL1108A | | | | | |
| L0455 | Human retina cDNA randomly primed sublibrary | retina | eye | | | lambda gt10 |
| L0460 | Adult heart, Lambda gt11 | | | | | Lambda gt11 |
| L0462 | WATM1 | | | | | lambda gt11 |
| L0471 | Human fetal heart, Lambda ZAP Express | | | | | Lambda ZAP Express |
| L0475 | KG1-a Lambda Zap Express cDNA library | | | KG1-a | | Lambda Zap Express |
| | | | | | | (STRATAGENE ™) |
| L0480 | STRATAGENE ™ cat#937212 (1992) | | | | | Lambda ZAP, pBLUESCRIPT ™ |
| | | | | | | SK(−) |
| L0483 | Human pancreatic islet | | | | | Lambda ZAPII |
| L0485 | STRATAGENE ™ Human skeletal muscle cDNA | skeletal muscle | leg muscle | | | Lambda ZAPII |
| | library, cat. #936215. | | | | | |
| L0492 | Human Genomic | | | | | pAMP |
| L0493 | NCI_CGAP_Ov26 | papillary serous carcinoma | ovary | | | pAMP1 |
| L0499 | NCI_CGAP_HSC2 | stem cell 34+/38+ | bone marrow | | | pAMP1 |
| L0500 | NCI_CGAP_Brn20 | oligodendroglioma | brain | | | pAMP1 |
| L0503 | NCI_CGAP_Br17 | adenocarcinoma | breast | | | pAMP1 |
| L0509 | NCI_CGAP_Lu26 | invasive adenocarcinoma | lung | | | pAMP1 |
| L0511 | NCI_CGAP_Ov34 | borderline ovarian carcinoma | ovary | | | pAMP1 |
| L0512 | NCI_CGAP_Ov36 | borderline ovarian carcinoma | ovary | | | pAMP1 |
| L0515 | NCI_CGAP_Ov32 | papillary serous carcinoma | ovary | | | pAMP1 |
| L0517 | NCI_CGAP_Pr1 | | | | | pAMP10 |
| L0518 | NCI_CGAP_Pr2 | | | | | pAMP10 |
| L0519 | NCI_CGAP_Pr3 | | | | | pAMP10 |
| L0520 | NCI_CGAP_Alv1 | alveolar rhabdomyosarcoma | | | | pAMP10 |
| L0521 | NCI_CGAP_Ew1 | Ewing''s sarcoma | | | | pAMP10 |
| L0522 | NCI_CGAP_Kid1 | kidney | | | | pAMP10 |
| L0526 | NCI_CGAP_Pr12 | metastatic prostate bone lesion | | | | pAMP10 |
| L0527 | NCI_CGAP_Ov2 | ovary | | | | pAMP10 |
| L0528 | NCI_CGAP_Pr5 | prostate | | | | pAMP10 |
| L0529 | NCI_CGAP_Pr6 | prostate | | | | pAMP10 |
| L0532 | NCI_CGAP_Thy1 | thyroid | | | | pAMP10 |
| L0533 | NCI_CGAP_HSC1 | stem cells | bone marrow | | | pAMP10 |
| L0534 | Chromosome 7 Fetal Brain cDNA Library | brain | brain | | | pAMP10 |
| L0539 | Chromosome 7 Placental cDNA Library | | placenta | | | pAMP10 |
| L0540 | NCI_CGAP_Pr10 | invasive prostate tumor | prostate | | | pAMP10 |
| L0542 | NCI_CGAP_Pr11 | normal prostatic epithelial cells | prostate | | | pAMP10 |
| L0544 | NCI_CGAP_Pr4 | prostatic intraepithelial neoplasia - high grade | prostate | | | pAMP10 |
| L0545 | NCI_CGAP_Pr4.1 | prostatic intraepithelial neoplasia - high grade | prostate | | | pAMP10 |
| L0547 | NCI_CGAP_Pr16 | tumor | prostate | | | pAMP10 |
| L0549 | NCI_CGAP_HN10 | carcinoma in situ from retromolar trigone | | | | pAMP10 |
| L0560 | NCI_CGAP_HN12 | moderate to poorly differentiated invasive carcino | tongue | | | pAMP10 |
| L0564 | Jia bone marrow stroma | bone marrow stroma | | | | pBLUESCRIPT ™ |
| L0565 | Normal Human Trabecular Bone Cells | Bone | Hip | | | pBLUESCRIPT ™ |
| L0581 | STRATAGENE ™ liver (#937224) | | liver | | | pBLUESCRIPT ™ SK |
| L0584 | STRATAGENE ™ cDNA library Human heart, | | | | | pBLUESCRIPT ™ SK(+) |
| | cat#936208 | | | | | |
| L0586 | HTCDL1 | | | | | pBLUESCRIPT ™ SK(−) |
| L0587 | STRATAGENE ™ colon HT29 (#937221) | | | | | pBLUESCRIPT ™ SK− |
| L0588 | STRATAGENE ™ endothelial cell 937223 | | | | | pBLUESCRIPT ™ SK− |
| L0589 | STRATAGENE ™ fetal retina 937202 | | | | | pBLUESCRIPT ™ SK− |
| L0590 | STRATAGENE ™ fibroblast (#937212) | | | | | pBLUESCRIPT ™ SK− |
| L0591 | STRATAGENE ™ HeLa cell s3 937216 | | | | | pBLUESCRIPT ™ SK− |
| L0592 | STRATAGENE ™ hNT neuron (#937233) | | | | | pBLUESCRIPT ™ SK− |
| L0593 | STRATAGENE ™ neuroepithelium (#937231) | | | | | pBLUESCRIPT ™ SK− |
| L0595 | STRATAGENE ™ NT2 neuronal precursor 937230 | neuroepithelial cells | brain | | | pBLUESCRIPT ™ SK− |
| L0596 | STRATAGENE ™ colon (#937204) | | colon | | | pBLUESCRIPT ™ SK− |
| L0597 | STRATAGENE ™ corneal stroma (#937222) | | cornea | | | pBLUESCRIPT ™ SK− |
| L0598 | Morton Fetal Cochlea | cochlea | ear | | | pBLUESCRIPT ™ SK− |
| L0599 | STRATAGENE ™ lung (#937210) | | lung | | | pBLUESCRIPT ™ SK− |
| L0600 | Weizmann Olfactory Epithelium | olfactory epithelium | nose | | | pBLUESCRIPT ™ SK− |
| L0601 | STRATAGENE ™ pancreas (#937208) | | pancreas | | | pBLUESCRIPT ™ SK− |
| L0602 | Pancreatic Islet | pancreatic islet | pancreas | | | pBLUESCRIPT ™ SK− |
| L0603 | STRATAGENE ™ placenta (#937225) | | placenta | | | pBLUESCRIPT ™ SK− |
| L0604 | STRATAGENE ™ muscle 937209 | muscle | skeletal muscle | | | pBLUESCRIPT ™ SK− |
| L0605 | STRATAGENE ™ fetal spleen (#937205) | fetal spleen | spleen | | | pBLUESCRIPT ™ SK− |
| L0606 | NCI_CGAP_Lym5 | follicular lymphoma | lymph node | | | pBLUESCRIPT ™ SK− |
| L0607 | NCI_CGAP_Lym6 | mantle cell lymphoma | lymph node | | | pBLUESCRIPT ™ SK− |
| L0608 | STRATAGENE ™ lung carcinoma 937218 | lung carcinoma | lung | NCI-H69 | | pBLUESCRIPT ™ SK− |
| L0611 | Schiller meningioma | meningioma | brain | | | pBLUESCRIPT ™ SK− |
| | | | | | | (STRATAGENE ™) |
| L0612 | Schiller oligodendroglioma | oligodendroglioma | brain | | | pBLUESCRIPT ™ SK− |
| | | | | | | (STRATAGENE ™) |
| L0616 | Chromosome 21 exon | | | | | pBLUESCRIPT ™ IIKS+ |
| L0619 | Chromosome 9 exon II | | | | | pBLUESCRIPT ™ IIKS+ |
| L0622 | HM1 | | | | | pcDNAII (Invitrogen) |
| L0623 | HM3 | pectoral muscle (after mastectomy) | | | | pcDNAII (Invitrogen) |
| L0625 | NCI_CGAP_AR1 | bulk alveolar tumor | | | | pCMV-SPORT2 |
| L0626 | NCI_CGAP_GC1 | bulk germ cell seminoma | | | | pCMV-SPORT2 |
| L0628 | NCI_CGAP_Ov1 | ovary bulk tumor | ovary | | | pCMV-SPORT2 |
| L0629 | NCI_CGAP_Me13 | metastatic melanoma to bowel | bowel (skin | | | pCMV-SPORT4 |
| | | | primary) | | | |
| L0630 | NCI_CGAP_CNS1 | substantia nigra | brain | | | pCMV-SPORT4 |
| L0634 | NCI_CGAP_Ov8 | serous adenocarcinoma | ovary | | | pCMV-SPORT4 |
| L0635 | NCI_CGAP_PNS1 | dorsal root ganglion | peripheral nervous | | | pCMV-SPORT4 |
| | | | system | | | |
| L0636 | NCI_CGAP_Pit1 | four pooled pituitary adenomas | brain | | | pCMV-SPORT6 |
| L0637 | NCI_CGAP_Brn53 | three pooled meningiomas | brain | | | pCMV-SPORT6 |
| L0638 | NCI_CGAP_Brn35 | tumor, 5 pooled (see description) | brain | | | pCMV-SPORT6 |
| L0639 | NCI_CGAP_Brn52 | tumor, 5 pooled (see description) | brain | | | pCMV-SPORT6 |
| L0640 | NCI_CGAP_Br18 | four pooled high-grade tumors, including two prima | breast | | | pCMV-SPORT6 |
| L0641 | NCI_CGAP_Co17 | juvenile granulosa tumor | colon | | | pCMV-SPORT6 |
| L0642 | NCI_CGAP_Co18 | moderately differentiated adenocarcinoma | colon | | | pCMV-SPORT6 |
| L0643 | NCI_CGAP_Co19 | moderately differentiated adenocarcinoma | colon | | | pCMV-SPORT6 |
| L0644 | NCI_CGAP_Co20 | moderately differentiated adenocarcinoma | colon | | | pCMV-SPORT6 |
| L0645 | NCI_CGAP_Co21 | moderately differentiated adenocarcinoma | colon | | | pCMV-SPORT6 |
| L0646 | NCI_CGAP_Co14 | moderately-differentiated adenocarcinoma | colon | | | pCMV-SPORT6 |
| L0647 | NCI_CGAP_Sar4 | five pooled sarcomas, including myxoid | connective tissue | | | pCMV-SPORT6 |
| | | liposarcoma | | | | |
| L0648 | NCI_CGAP_Eso2 | squamous cell carcinoma | esophagus | | | pCMV-SPORT6 |
| L0649 | NCI_CGAP_GU1 | 2 pooled high-grade transitional cell tumors | genitourinary tract | | | pCMV-SPORT6 |
| L0650 | NCI_CGAP_Kid13 | 2 pooled Wilms'' tumors, one primary and one | kidney | | | pCMV-SPORT6 |
| | | metast | | | | |
| L0651 | NCI_CGAP_Kid8 | renal cell tumor | kidney | | | pCMV-SPORT6 |
| L0652 | NCI_CGAP_Lu27 | four pooled poorly-differentiated adenocarcinomas | lung | | | pCMV-SPORT6 |
| L0653 | NCI_CGAP_Lu28 | two pooled squamous cell carcinomas | lung | | | pCMV-SPORT6 |
| L0654 | NCI_CGAP_Lu31 | | lung, cell line | | | pCMV-SPORT6 |
| L0655 | NCI_CGAP_Lym12 | lymphoma, follicular mixed small and large cell | lymph node | | | pCMV-SPORT6 |
| L0656 | NCI_CGAP_Ov38 | normal epithelium | ovary | | | pCMV-SPORT6 |
| L0657 | NCI_CGAP_Ov23 | tumor, 5 pooled (see description) | ovary | | | pCMV-SPORT6 |
| L0658 | NCI_CGAP_Ov35 | tumor, 5 pooled (see description) | ovary | | | pCMV-SPORT6 |
| L0659 | NCI_CGAP_Pan1 | adenocarcinoma | pancreas | | | pCMV-SPORT6 |
| L0661 | NCI_CGAP_Mel15 | malignant melanoma, metastatic to lymph node | skin | | | pCMV-SPORT6 |
| L0662 | NCI_CGAP_Gas4 | poorly differentiated adenocarcinoma with signet r | stomach | | | pCMV-SPORT6 |
| L0663 | NCI_CGAP_Ut2 | moderately-differentiated endometrial adenocarcino | uterus | | | pCMV-SPORT6 |
| L0664 | NCI_CGAP_Ut3 | poorly-differentiated endometrial adenocarcinoma, | uterus | | | pCMV-SPORT6 |
| L0665 | NCI_CGAP_Ut4 | serous papillary carcinoma, high grade, 2 pooled t | uterus | | | pCMV-SPORT6 |
| L0666 | NCI_CGAP_Ut1 | well-differentiated endometrial adenocarcinoma, 7 | uterus | | | pCMV-SPORT6 |
| L0667 | NCI_CGAP_CML1 | myeloid cells, 18 pooled CML cases, BCR/ABL | whole blood | | | pCMV-SPORT6 |
| | | rearra | | | | |
| L0683 | Stanley Frontal NS pool 2 | frontal lobe (see description) | brain | | | pCR2.1-TOPO (Invitrogen) |
| L0697 | Testis 1 | | | | | PGEM 5zf(+) |
| L0698 | Testis 2 | | | | | PGEM 5zf(+) |
| L0708 | NIH_MGC_17 | rhabdomyosarcoma | muscle | | | pOTB7 |
| L0709 | NIH_MGC_21 | choriocarcinoma | placenta | | | pOTB7 |
| L0710 | NIH_MGC_7 | small cell carcinoma | lung | MGC3 | | pOTB7 |
| L0717 | Gessler Wilms tumor | | | | | pSPORT1 |
| L0731 | Soares_pregnant_uterus_NbHPU | | uterus | | | pT7T3-Pac |
| L0738 | Human colorectal cancer | | | | | pT7T3D |
| L0740 | Soares melanocyte 2NbHM | melanocyte | | | | pT7T3D (PHARMACIA ™) with a |
| | | | | | | modified polylinker |
| L0741 | Soares adult brain N2b4HB55Y | | brain | | | pT7T3D (PHARMACIA ™) with a |
| | | | | | | modified polylinker |
| L0742 | Soares adult brain N2b5HB55Y | | brain | | | pT7T3D (PHARMACIA ™) with a |
| | | | | | | modified polylinker |
| L0743 | Soares breast 2NbHBst | | breast | | | pT7T3D (PHARMACIA ™) with a |
| | | | | | | modified polylinker |
| L0744 | Soares breast 3NbHBst | | breast | | | pT7T3D (PHARMACIA ™) with a |
| | | | | | | modified polylinker |
| L0745 | Soares retina N2b4HR | retina | eye | | | pT7T3D (PHARMACIA ™) with a |
| | | | | | | modified polylinker |
| L0746 | Soares retina N2b5HR | retina | eye | | | pT7T3D (PHARMACIA ™) with a |
| | | | | | | modified polylinker |
| L0747 | Soares_fetal_heart_NbHH19W | | heart | | | pT7T3D (PHARMACIA ™) with a |
| | | | | | | modified polylinker |
| L0748 | Soares fetal liver spleen 1NFLS | | Liver and Spleen | | | pT7T3D (PHARMACIA ™) with a |
| | | | | | | modified polylinker |
| L0749 | Soares_fetal_liver_spleen_1NFLS_S1 | | Liver and Spleen | | | pT7T3D (PHARMACIA ™) with a |
| | | | | | | modified polylinker |
| L0750 | Soares_fetal_lung_NbHL19W | | lung | | | pT7T3D (PHARMACIA ™) with a |
| | | | | | | modified polylinker |
| L0751 | Soares ovary tumor NbHOT | ovarian tumor | ovary | | | pT7T3D (PHARMACIA ™) with a |
| | | | | | | modified polylinker |
| L0752 | Soares_parathyroid_tumor_NbHPA | parathyroid tumor | parathyroid gland | | | pT7T3D (PHARMACIA ™) with a |
| | | | | | | modified polylinker |
| L0753 | Soares_pineal_gland_N3HPG | | pineal gland | | | pT7T3D (PHARMACIA ™) with a |
| | | | | | | modified polylinker |
| L0754 | Soares placenta Nb2HP | | placenta | | | pT7T3D (PHARMACIA ™) with a |
| | | | | | | modified polylinker |
| L0755 | Soares_placenta_8to9weeks_2NbHP8to9 W | | placenta | | | pT7T3D (PHARMACIA ™) with a |
| | | | | | | modified polylinker |
| L0756 | Soares_multiple_sclerosis_2NbHMSP | multiple sclerosis lesions | | | | pT7T3D (PHARMACIA ™) with a |
| | | | | | | modified polylinker V_TYPE |
| L0757 | Soares_senescent_fibroblasts_NbHSF | senescent fibroblast | | | | pT7T3D (PHARMACIA ™) with a |
| | | | | | | modified polylinker V_TYPE |
| L0758 | Soares_testis_NHT | | | | | pT7T3D-Pac (PHARMACIA ™) |
| | | | | | | with a modified polylinker |
| L0759 | Soares_total_fetus_Nb2HF8_9w | | | | | pT7T3D-Pac (PHARMACIA ™) |
| | | | | | | with a modified polylinker |
| L0761 | NCI_CGAP_CLL1 | B-cell, chronic lymphotic leukemia | | | | pT7T3D-Pac (PHARMACIA ™) |
| | | | | | | with a modified polylinker |
| L0762 | NCI_CGAP_Br1.1 | breast | | | | pT7T3D-Pac (PHARMACIA ™) |
| | | | | | | with a modified polylinker |
| L0763 | NCI_CGAP_Br2 | breast | | | | pT7T3D-Pac (PHARMACIA ™) |
| | | | | | | with a modified polylinker |
| L0764 | NCI_CGAP_Co3 | colon | | | | pT7T3D-Pac (PHARMACIA ™) |
| | | | | | | with a modified polylinker |
| L0765 | NCI_CGAP_Co4 | colon | | | | pT7T3D-Pac (PHARMACIA ™) |
| | | | | | | with a modified polylinker |
| L0766 | NCI_CGAP_GCB1 | germinal center B cell | | | | pT7T3D-Pac (PHARMACIA ™) |
| | | | | | | with a modified polylinker |
| L0767 | NCI_CGAP_GC3 | pooled germ cell tumors | | | | pT7T3D-Pac (PHARMACIA ™) |
| | | | | | | with a modified polylinker |
| L0768 | NCI_CGAP_GC4 | pooled germ cell tumors | | | | pT7T3D-Pac (PHARMACIA ™) |
| | | | | | | with a modified polylinker |
| L0769 | NCI_CGAP_Brn25 | anaplastic oligodendroglioma | brain | | | pT7T3D-Pac (PHARMACIA ™) |
| | | | | | | with a modified polylinker |
| L0770 | NCI_CGAP_Brn23 | glioblastoma (pooled) | brain | | | pT7T3D-Pac (PHARMACIA ™) |
| | | | | | | with a modified polylinker |
| L0771 | NCI_CGAP_Co8 | adenocarcinoma | colon | | | pT7T3D-Pac (PHARMACIA ™) |
| | | | | | | with a modified polylinker |
| L0772 | NCI_CGAP_Co10 | colon tumor RER+ | colon | | | pT7T3D-Pac (PHARMACIA ™) |
| | | | | | | with a modified polylinker |
| L0773 | NCI_CGAP_Co9 | colon tumor RER+ | colon | | | pT7T3D-Pac (PHARMACIA ™) |
| | | | | | | with a modified polylinker |
| L0774 | NCI_CGAP_Kid3 | | kidney | | | pT7T3D-Pac (PHARMACIA ™) |
| | | | | | | with a modified polylinker |
| L0775 | NCI_CGAP_Kid5 | 2 pooled tumors (clear cell type) | kidney | | | pT7T3D-Pac (PHARMACIA ™) |
| | | | | | | with a modified polylinker |
| L0776 | NCI_CGAP_Lu5 | carcinoid | lung | | | pT7T3D-Pac (PHARMACIA ™) |
| | | | | | | with a modified polylinker |
| L0777 | Soares_NhHMPu_S1 | Pooled human melanocyte, fetal heart, and pregnant | mixed (see below) | | | pT7T3D-Pac (PHARMACIA ™) |
| | | | | | | with a modified polylinker |
| L0779 | Soares_NFL_T_GBC_S1 | | pooled | | | pT7T3D-Pac (PHARMACIA ™) |
| | | | | | | with a modified polylinker |
| L0780 | Soares_NSF_F8_9W_OT_PA_P_S1 | | pooled | | | pT7T3D-Pac (PHARMACIA ™) |
| | | | | | | with a modified polylinker |
| L0782 | NCI_CGAP_Pr21 | normal prostate | prostate | | | pT7T3D-Pac (PHARMACIA ™) |
| | | | | | | with a modified polylinker |
| L0783 | NCI_CGAP_Pr22 | normal prostate | prostate | | | pT7T3D-Pac (PHARMACIA ™) |
| | | | | | | with a modified polylinker |
| L0784 | NCI_CGAP_Lei2 | leiomyosarcoma | soft tissue | | | pT7T3D-Pac (PHARMACIA ™) |
| | | | | | | with a modified polylinker |
| L0785 | Barstead spleen HPLRB2 | | spleen | | | pT7T3D-Pac (PHARMACIA ™) |
| | | | | | | with a modified polylinker |
| L0786 | Soares_NbHFB | | whole brain | | | pT7T3D-Pac (PHARMACIA ™) |
| | | | | | | with a modified polylinker |
| L0787 | NCI_CGAP_Sub1 | | | | | pT7T3D-Pac (PHARMACIA ™) |
| | | | | | | with a modified polylinker |
| L0788 | NCI_CGAP_Sub2 | | | | | pT7T3D-Pac (PHARMACIA ™) |
| | | | | | | with a modified polylinker |
| L0789 | NCI_CGAP_Sub3 | | | | | pT7T3D-Pac (PHARMACIA ™) |
| | | | | | | with a modified polylinker |
| L0790 | NCI_CGAP_Sub4 | | | | | pT7T3D-Pac (PHARMACIA ™) |
| | | | | | | with a modified polylinker |
| L0791 | NCI_CGAP_Sub5 | | | | | pT7T3D-Pac (PHARMACIA ™) |
| | | | | | | with a modified polylinker |
| L0792 | NCI_CGAP_Sub6 | | | | | pT7T3D-Pac (PHARMACIA ™) |
| | | | | | | with a modified polylinker |
| L0793 | NCI_CGAP_Sub7 | | | | | pT7T3D-Pac (PHARMACIA ™) |
| | | | | | | with a modified polylinker |
| L0794 | NCI_CGAP_GC6 | pooled germ cell tumors | | | | pT7T3D-Pac (PHARMACIA ™) |
| | | | | | | with a modified polylinker |
| L0796 | NCI_CGAP_Brn50 | medulloblastoma | brain | | | pT7T3D-Pac (PHARMACIA ™) |
| | | | | | | with a modified polylinker |
| L0800 | NCI_CGAP_Co16 | colon tumor, RER+ | colon | | | pT7T3D-Pac (PHARMACIA ™) |
| | | | | | | with a modified polylinker |
| L0803 | NCI_CGAP_Kid11 | | kidney | | | pT7T3D-Pac (PHARMACIA ™) |
| | | | | | | with a modified polylinker |
| L0804 | NCI_CGAP_Kid12 | 2 pooled tumors (clear cell type) | kidney | | | pT7T3D-Pac (PHARMACIA ™) |
| | | | | | | with a modified polylinker |
| L0805 | NCI_CGAP_Lu24 | carcinoid | lung | | | pT7T3D-Pac (PHARMACIA ™) |
| | | | | | | with a modified polylinker |
| L0806 | NCI_CGAP_Lu19 | squamous cell carcinoma, poorly differentiated (4 | lung | | | pT7T3D-Pac (PHARMACIA ™) |
| | | | | | | with a modified polylinker |
| L0807 | NCI_CGAP_Ov18 | fibrotheoma | ovary | | | pT7T3D-Pac (PHARMACIA ™) |
| | | | | | | with a modified polylinker |
| L0808 | Barstead prostate BPH HPLRB4 I | | prostate | | | pT7T3D-Pac (PHARMACIA ™) |
| | | | | | | with a modified polylinker |
| L0809 | NCI_CGAP_Pr28 | | prostate | | | pT7T3D-Pac (PHARMACIA ™) |
| | | | | | | with a modified polylinker |
| L0879 | BT0254 | | breast | | | puc18 |
| L0946 | BT0333 | | breast | | | puc18 |
| L1441 | CT0249 | | colon | | | puc18 |
| L1499 | CT0322 | | colon | | | puc18 |
| L1788 | HT0229 | | head_neck | | | puc18 |
| L1877 | HT0340 | | head_neck | | | puc18 |
| L2251 | Human fetal lung | Fetal lung | | | | |
| L2252 | Human placenta | placenta | | | | |
| L2257 | NIH_MGC_65 | adenocarcinoma | colon | | | pCMV-SPORT6 |
| L2259 | NIH_MGC_68 | large cell carcinoma | lung | | | pCMV-SPORT6 |
| L2260 | NIH_MGC_69 | large cell carcinoma, undifferentiated | lung | | | pCMV-SPORT6 |
| L2261 | NIH_MGC_70 | epithelioid carcinoma | pancreas | | | pCMV-SPORT6 |
| L2262 | NIH_MGC_72 | melanotic melanoma | skin | | | pCMV-SPORT6 |
| L2263 | NIH_MGC_66 | adenocarcinoma | ovary | | | pCMV-SPORT6 |
| L2264 | NIH_MGC_71 | leiomyosarcoma | uterus | | | pCMV-SPORT6 |
| L2270 | Lupski_dorsal_root_ganglion | dorsal root ganglia | | | | pCMV-SPORT6 (LIFE |
| | | | | | | TECHNOLOGIES ™) |
| L2357 | UT0021 | | uterus_tumor | | | puc18 |
| L2498 | HT0619 | | head_neck | | | puc18 |
| L2504 | HT0636 | | head_neck | | | puc18 |
| L2570 | HT0771 | | head_neck | | | puc18 |
| L2637 | HT0877 | | head_neck | | | puc18 |
| L2647 | HT0894 | | head_neck | | | puc18 |
| L2651 | NIH_MGC_20 | melanotic melanoma | skin | | | pOTB7 |
| L2653 | NIH_MGC_58 | hypernephroma | kidney | | | pDNR-LIB (CLONTECH ™) |
| L2654 | NIH_MGC_9 | adenocarcinoma cell line | ovary | | | pOTB7 |
| L2657 | NIH_MGC_54 | from chronic myelogenous leukemia | bone marrow | | | pDNR-LIB (CLONTECH ™) |
| L2669 | NT0022 | | nervous_tumor | | | puc18 |
| L2702 | NT0098 | | nervous_tumor | | | puc18 |
| L2799 | FT0096 | | prostate_tumor | | | puc18 |
| L2817 | FT0131 | | prostate_tumor | | | puc18 |
| L2904 | BN0042 | | breast_normal | | | puc18 |
| L2910 | BN0070 | | breast_normal | | | puc18 |
| L3081 | ET0005 | | lung_tumor | | | puc18 |
| L3104 | ET0041 | | lung_tumor | | | puc18 |
| L3111 | ET0058 | | lung_tumor | | | puc18 |
| L3154 | MT0050 | | marrow | | | puc18 |
| L3210 | OT0067 | | ovary | | | puc18 |
| L3262 | FN0073 | | prostate_normal | | | puc18 |
| L3377 | TN0079 | | testis_normal | | | puc18 |
| L3387 | GKB | hepatocellular carcinoma | | | | pBLUESCRIPT ™ sk(−) |
| L3388 | GKC | hepatocellular carcinoma | | | | pBLUESCRIPT ™ sk(−) |
| L3391 | NIH_MGC_53 | carcinoma, cell line | bladder | | | pDNR-LIB (CLONTECH ™) |
| L3403 | AN0087 | | amnion_normal | | | puc18 |
| L3404 | AN0089 | | amnion_normal | | | puc18 |
| L3459 | FT0175 | | prostate_tumor | | | puc18 |
| L3480 | GN0057 | | placenta_normal | | | puc18 |
| L3485 | GN0070 | | placenta_normal | | | puc18 |
| L3499 | HT0617 | | head_neck | | | puc18 |
| L3503 | HT0870 | | head_neck | | | puc18 |
| L3506 | HT0879 | | head_neck | | | puc18 |
| L3530 | HT0939 | | head_neck | | | puc18 |
| L3561 | TN0025 | | testis_normal | | | puc18 |
| L3618 | UT0050 | | uterus_tumor | | | puc18 |
| L3643 | ADB | Adrenal gland | | | | pBLUESCRIPT ™ sk(−) |
| L3644 | ADC | Adrenal gland | | | | pBLUESCRIPT ™ sk(−) |
| L3653 | HTB | Hypothalamus | | | | pBLUESCRIPT ™ sk(−) |
| L3655 | HTC | Hypothalamus | | | | pBLUESCRIPT ™ sk(−) |
| L3658 | cdA | pheochromocytoma | | | | pTriplEx2 |
| L3659 | CB | cord blood | | | | pBLUESCRIPT ™ |
| L3661 | NPA | pituitary | | | | pBLUESCRIPT ™ sk(−) |
| L3665 | NIH_MGC_75 | | kidney | | | pDNR-LIB (CLONTECH ™) |
| L3705 | CT0486 | | colon | | | puc18 |
| L3713 | CT0524 | | colon | | | puc18 |
| L3808 | UT0078 | | uterus_tumor | | | puc18 |
| L3811 | NPC | pituitary | | | | pBLUESCRIPT ™ sk(−) |
| L3812 | NPD | pituitary | | | | pBLUESCRIPT ™ sk(−) |
| L3813 | TP | pituitary tumor | | | | pTriplEx2 |
| L3814 | BM | Bone marrow | | | | pTriplEx2 |
| L3816 | HEMBA1 | whole embryo, mainly head | | | | pME18SFL3 |
| L3817 | HEMBB1 | whole embryo, mainly body | | | | pME18SFL3 |
| L3819 | NIH_MGC_76 | | liver | | | pDNR-LIB (CLONTECH ™) |
| L3825 | NT2RM4 | | | NT2 | | pME18SFL3 |
| L3826 | NT2RP1 | | | NT2 | | pUC19FL3 |
| L3827 | NT2RP2 | | | NT2 | | pME18SFL3 |
| L3828 | NT2RP3 | | | NT2 | | pME18SFL3 |
| L3829 | NT2RP4 | | | NT2 | | pME18SFL3 |
| L3833 | PLACE2 | placenta | | | | pME18SFL3 |
| L3834 | PLACE3 | placenta | | | | pME18SFL3 |
| L3837 | THYRO1 | thyroid gland | | | | pME18SFL3 |
| L3841 | NIH_MGC_18 | large cell carcinoma | lung | | | pOTB7 |
| L3871 | NIH_MGC_19 | neuroblastoma | brain | | | pOTB7 |
| L3872 | NCI_CGAP_Skn1 | | skin, normal, 4 | | | pCMV-SPORT6 |
| | | | pooled sa | | | |
| L3904 | NCI_CGAP_Brn64 | glioblastoma with EGFR amplification | brain | | | pCMV-SPORT6 |
| L3905 | NCI_CGAP_Brn67 | anaplastic oligodendroglioma with 1p/19q loss | brain | | | pCMV-SPORT6 |
| L4501 | NCI_CGAP_Sub8 | | | | | pT7T3D-Pac (PHARMACIA ™) |
| | | | | | | with a modified polylinker |
| L4556 | NCI_CGAP_HN13 | squamous cell carcinoma | tongue | | | pCMV-SPORT6 |
| L4560 | NCI_CGAP_Ut7 | tumor | uterus | | | pCMV-SPORT6 |
| L4669 | NCI_CGAP_Ov41 | serous papillary tumor | ovary | | | pCMV-SPORT6 |
| L4747 | NCI_CGAP_Brn41 | oligodendroglioma | brain | | | pT7T3D-Pac (PHARMACIA ™) |
| | | | | | | with a modified polylinker |
| L5565 | NCI_CGAP_Brn66 | glioblastoma with probably TP53 mutation and | brain | | | pCMV-SPORT6 |
| | | witho | | | | |
| L5566 | NCI_CGAP_Brn70 | anaplastic oligodendroglioma | brain | | | pCMV-SPORT6.ccdb |
| L5568 | NCI_CGAP_HN21 | nasopharyngeal carcinoma | head/neck | | | pAMP1 |
| L5569 | NCI_CGAP_HN17 | normal epithelium | nasopharynx | | | pAMP10 |
| L5574 | NCI_CGAP_HN19 | normal epithelium | nasopharynx | | | pAMP10 |
| L5575 | NCI_CGAP_Brn65 | glioblastoma without EGFR amplification | brain | | | pCMV-SPORT6 |
| L5622 | NCI_CGAP_Skn3 | | skin | | | pCMV-SPORT6 |
| L5623 | NCI_CGAP_Skn4 | squamous cell carcinoma | skin | | | pCMV-SPORT6 |

Description of Table 5

[0154] Table 5 provides a key to the OMIM reference identification numbers disclosed in Table 1B.1, column 9. OMIM reference identification numbers (Column 1) were derived from Online Mendelian Inheritance in Man (Online Mendelian Inheritance in Man, OMIM. McKusick-Nathans Institute for Genetic Medicine, Johns Hopkins University (Baltimore, Md.) and National Center for Biotechnology Information, National Library of Medicine, (Bethesda, Md.) 2000. Column 2 provides diseases associated with the cytologic band disclosed in Table 1B.1, column 8, as determined using the Morbid Map database.

TABLE 5

| OMIM Reference | Description |
|---|---|
| 101000 | Meningioma, NF2-related, sporadic Schwannoma, sporadic |
| 101000 | Neurofibromatosis, type 2 |
| 101000 | Neurolemmomatosis |
| 101000 | Malignant mesothelioma, sporadic |
| 103050 | Autism, succinylpurinemic |
| 103050 | Adenylosuccinase deficiency |
| 103581 | Albright hereditary osteodystrophy-2 |
| 103600 | [Dysalbuminemic hyperthyroxinemia] |
| 103600 | [Dysalbuminemic hyperzincemia], 194470 |
| 103600 | Analbuminemia |
| 104150 | [AFP deficiency, congenital] |
| 104150 | [Hereditary persistence of alpha-fetoprotein] |
| 104500 | Amelogenesis imperfecta-2, hypoplastic local type |
| 104770 | Amyloidosis, secondary, susceptibility to |
| 106150 | Hypertension, essential, susceptibility to |
| 106150 | Preeclampsia, susceptibility to |
| 106180 | Myocardial infarction, susceptibility to |
| 107300 | Antithrombin III deficiency |
| 107670 | Apolipoprotein A-II deficiency |
| 108725 | Atherosclerosis, susceptibility to |
| 109270 | Renal tubular acidosis, distal, 179800 |
| 109270 | Spherocytosis, hereditary |
| 109270 | [Acanthocytosis, one form] |
| 109270 | [Elliptocytosis, Malaysian-Melanesian type] |
| 109270 | Hemolytic anemia due to band 3 defect |
| 109560 | Leukemia/lymphoma, B-cell, 3 |
| 109690 | Asthma, nocturnal, susceptibility to |
| 109690 | Obesity, susceptibility to |
| 110700 | Vivax malaria, susceptibility to |
| 113100 | Brachydactyly, type C |
| 114835 | Monocyte carboxyesterase deficiency |
| 115665 | Cataract, congenital, Volkmann type |
| 116806 | Colorectal cancer |
| 118485 | Polycystic ovary syndrome with hyperandrogenemia |
| 118800 | Choreoathetosis, familial paroxysmal |
| 120070 | Alport syndrome, autosomal recessive, 203780 |
| 120120 | Epidermolysis bullosa dystrophica, dominant, 131750 |
| 120120 | Epidermolysis bullosa dystrophica, recessive, 226600 |
| 120120 | Epidermolysis bullosa, pretibial, 131850 |
| 120131 | Alport syndrome, autosomal recessive, 203780 |
| 120131 | Hematuria, familial benign |
| 120150 | Osteogenesis imperfecta, 4 clinical forms, 166200, 166210, 259420, 166220 |
| 120150 | Osteoporosis, idiopathic, 166710 |
| 120150 | Ehlers-Danlos syndrome, type VIIA1, 130060 |
| 120260 | Epiphyseal dysplasia, multiple, type 2, 600204 |
| 120435 | Muir-Torre syndrome, 158320 |
| 120435 | Colorectal cancer, hereditary, nonpolyposis, type 1 Ovarian cancer |
| 120436 | Muir-Torre family cancer syndrome, 158320 |
| 120436 | Turcot syndrome with glioblastoma, 276300 |
| 120436 | Colorectal cancer, hereditary nonpolyposis, type 2 |
| 120550 | C1q deficiency, type A |
| 120570 | C1q deficiency, type B |
| 120575 | C1q deficiency, type C |
| 120700 | C3 deficiency |
| 120950 | C8 deficiency, type I |
| 120960 | C8 deficiency, type II |
| 123270 | [Creatine kinase, brain type, ectopic expression of] |
| 123620 | Cataract, cerulean, type 2, 601547 |
| 123660 | Cataract, Coppock-like |
| 124030 | Parkinsonism, susceptibility to |
| 124030 | Debrisoquine sensitivity |
| 124200 | Darier disease (keratosis follicularis) |
| 125270 | Porphyria, acute hepatic |
| 125270 | Lead poisoning, susceptibility to |
| 125370 | Dentatorubro-pallidoluysian atrophy |
| 125660 | Myopathy, desminopathic |
| 125660 | Cardiomyopathy |
| 126600 | Drusen, radial, autosomal dominant |
| 128100 | Dystonia-1, torsion |
| 130500 | Elliptocytosis-1 |
| 131210 | Atherosclerosis, susceptibility to |
| 132700 | Cylindromatosis |
| 133171 | [Erythrocytosis, familial], 133100 |
| 133200 | Erythrokeratodermia variabilis |
| 133701 | Exostoses, multiple, type 2 |
| 135300 | Fibromatosis, gingival |
| 136132 | [Fish-odor syndrome], 602079 |
| 136435 | Ovarian dysgenesis, hypergonadotropic, with normal karyotype, 233300 |
| 136550 | Macular dystrophy, North Carolina type |
| 136836 | Fucosyltransferase-6 deficiency |
| 137350 | Amyloidosis, Finnish type, 105120 |
| 138030 | [Hyperproglucagonemia] |
| 138140 | Glucose transport defect, blood-brain barrier |
| 138320 | Hemolytic anemia due to glutathione peroxidase deficiency |
| 138700 | [Apolipoprotein H deficiency] |
| 138981 | Pulmonary alveolar proteinosis, 265120 |
| 139190 | Gigantism due to GHRF hypersecretion |
| 139190 | Isolated growth hormone deficiency due to defect in GHRF |
| 139250 | Isolated growth hormone deficiency, Illig type with absent GH and Kowarski type with bioinactive GH |
| 141750 | Alpha-thalassemia/mental retardation syndrome, type 1 |
| 141800 | Methemoglobinemias, alpha- |
| 141800 | Thalassemias, alpha- |
| 141800 | Erythremias, alpha- |
| 141800 | Heinz body anemias, alpha- |
| 141850 | Thalassemia, alpha- |
| 141850 | Erythrocytosis |
| 141850 | Heinz body anemia |
| 141850 | Hemoglobin H disease |
| 141850 | Hypochromic microcytic anemia |
| 142335 | Hereditary persistence of fetal hemoglobin, heterocellular, Indian type |
| 144120 | Hyperimmunoglobulin G1 syndrome |
| 145001 | Hyperparathyroidism-jaw tumor syndrome |
| 145260 | Pseudohypoaldosteronism, type II |
| 145981 | Hypocalciuric hypercalcemia, type II |
| 146150 | Hypomelanosis of Ito |
| 146760 | [IgG receptor I, phagocytic, familial deficiency of] |
| 146790 | Lupus nephritis, susceptibility to |
| 147020 | Agammaglobulinemia, 601495 |
| 147110 | IgG2 deficiency, selective |
| 147141 | Leukemia, acute lymphoblastic |
| 147440 | Growth retardation with deafness and mental retardation |
| 148065 | White sponge nevus, 193900 |
| 148080 | Epidermolytic hyperkeratosis, 113800 |
| 148370 | Keratolytic winter erythema |
| 150200 | [Placental lactogen deficiency] |
| 150250 | Larsen syndrome, autosomal dominant |
| 151410 | Leukemia, chronic myeloid |
| 151670 | Hepatic lipase deficiency |
| 152200 | Coronary artery disease, susceptibility to |
| 152427 | Long QT syndrome-2 |
| 152790 | Precocious puberty, male, 176410 |
| 152790 | Leydig cell hypoplasia |
| 154275 | Malignant hyperthermia susceptibility 2 |
| 156845 | Tietz syndrome, 103500 |
| 156845 | Waardenburg syndrome, type IIA, 193510 |
| 156845 | Waardenburg syndrome/ocular albinism, digenic, 103470 |
| 156850 | Cataract, congenital, with microphthalmia |
| 157170 | Holoprosencephaly-2 |
| 158590 | Spinal muscular atrophy-4 |
| 160781 | Cardiomyopathy, hypertrophic, mid-left ventricular chamber type |
| 162200 | Neurofibromatosis, type 1 |
| 162200 | Watson syndrome, 193520 |
| 163729 | Hypertension, pregnancy-induced |
| 163950 | Noonan syndrome-1 |
| 163950 | Cardiofaciocutaneous syndrome, 115150 |
| 164500 | Spinocerebellar ataxia-7 |
| 164770 | Myeloid malignancy, predisposition to |
| 164920 | Piebaldism |
| 164920 | Mast cell leukemia |
| 164920 | Mastocytosis with associated hematologic disorder |
| 164953 | Liposarcoma |
| 167000 | Ovarian cancer, serous |
| 167410 | Rhabdomyosarcoma, alveolar, 268220 |
| 168360 | Paraneoplastic sensory neuropathy |
| 168468 | Metaphyseal chondrodysplasia, Murk Jansen type, 156400 |
| 168500 | Parietal foramina |
| 170650 | Periodontitis, juvenile |
| 171190 | Hypertension, essential, 145500 |
| 171650 | Lysosomal acid phosphatase deficiency |
| 171760 | Hypophosphatasia, adult, 146300 |
| 171760 | Hypophosphatasia, infantile, 241500 |
| 172430 | Enolase deficiency |
| 172490 | Phosphorylase kinase deficiency of liver and muscle, 261750 |
| 173610 | Platelet alpha/delta storage pool deficiency |
| 173870 | Xeroderma pigmentosum |
| 173870 | Fanconi anemia |
| 176100 | Porphyria cutanea tarda |
| 176100 | Porphyria, hepatoerythropoietic |
| 176261 | Jervell and Lange-Nielsen syndrome, 220400 |
| 176270 | Prader-Willi syndrome |
| 176450 | Sacral agenesis-1 |
| 176930 | Dysprothrombinemia |
| 176930 | Hypoprothrombinemia |
| 176960 | Pituitary tumor, invasive |
| 178300 | Ptosis, hereditary congenital, 1 |
| 180071 | Retinitis pigmentosa, autosomal recessive |
| 180105 | Retinitis piginentosa-10 |
| 181430 | Scapuloperoneal syndrome, myopathic type |
| 182138 | Anxiety-related personality traits |
| 182280 | Small-cell cancer of lung |
| 182380 | Glucose/galactose malabsorption |
| 182600 | Spastic paraplegia-3A |
| 182601 | Spastic paraplegia-4 |
| 185800 | Symphalangism, proximal |
| 186580 | Arthrocutaneouveal granulomatosis |
| 186880 | Leukemia/lymphoma, T-cell |
| 187040 | Leukemia-1, T-cell acute lymphoblastic |
| 188070 | Bleeding disorder due to defective thromboxane A2 receptor |
| 188826 | Sorsby fundus dystrophy, 136900 |
| 190040 | Meningioma, SIS-related |
| 190040 | Dermatofibrosarcoma protuberans |
| 190040 | Giant-cell fibroblastoma |
| 190195 | Ichthyosiform erythroderma, congenital, 242100 |
| 190195 | Ichthyosis, lamellar, autosomal recessive, 242300 |
| 190605 | Triphalangeal thumb-polysyndactyly syndrome |
| 191092 | Tuberous sclerosis-2 |
| 191100 | Tuberous sclerosis-1 |
| 191315 | Insensitivity to pain, congenital, with anhidrosis, 256800 |
| 193500 | Rhabdomyosarcoma, alveolar, 268220 |
| 193500 | Waardenburg syndrome, type I |
| 193500 | Waardenburg syndrome, type III, 148820 |
| 193500 | Craniofacial-deafness-hand syndrome, 122880 |
| 201460 | Acyl-CoA dehydrogenase, long chain, deficiency of |
| 205100 | Amyotrophic lateral sclerosis, juvenile |
| 205900 | Anemia, Diamond-Blackfan |
| 212138 | Carnitine-acylcarnitine translocase deficiency |
| 215700 | Citrullinemia |
| 218000 | Andermann syndrome |
| 221820 | Gliosis, familial progressive subcortical |
| 222700 | Lysinuric protein intolerance |
| 222800 | Hemolytic anemia due to bisphosphoglycerate mutase deficiency |
| 222900 | Sucrose intolerance |
| 223360 | Dopamine-beta-hydroxylase deficiency |
| 224100 | Congenital dyserythropoietic anemia II |
| 225500 | Ellis-van Creveld syndrome |
| 227220 | [Eye color, brown] |
| 230000 | Fucosidosis |
| 230400 | Galactosemia |
| 231680 | Glutaricaciduria, type IIA |
| 232800 | Glycogen storage disease VII |
| 237300 | Carbamoylphosphate synthetase I deficiency |
| 238310 | Hyperglycinemia, nonketotic, type II |
| 238600 | Chylomicronemia syndrome, familial |
| 238600 | Combined hyperlipemia, familial |
| 238600 | Hyperlipoproteinemia I |
| 238600 | Lipoprotein lipase deficiency |
| 239100 | Van Buchem disease |
| 245200 | Krabbe disease |
| 246450 | HMG-CoA lyase deficiency |
| 249000 | Meckel syndrome |
| 250250 | Cartilage-hair hypoplasia |
| 251170 | Mevalonicaciduria |
| 251600 | Microphthalmia, autosomal recessive |
| 253250 | Mulibrey nanism |
| 255800 | Schwartz-Jampel syndrome |
| 259900 | Hyperoxaluria, primary, type 1 |
| 262000 | Bjornstad syndrome |
| 268900 | [Sarcosinemia] |
| 270100 | Situs inversus viscerum |
| 272800 | Tay-Sachs disease |
| 272800 | [Hex A pseudodeficiency] |
| 272800 | GM2-gangliosidosis, juvenile, adult |
| 276700 | Tyrosinemia, type I |
| 276710 | Tyrosinemia, type III |
| 276900 | Usher syndrome, type 1A |
| 276901 | Usher syndrome, type 2 |
| 277730 | Wernicke-Korsakoff syndrome, susceptibility to |
| 278700 | Xeroderma pigmentosum, group A |
| 300000 | Opitz G syndrome, type I |
| 300066 | Deafness, X-linked 6, sensorineural |
| 300077 | Mental retardation, X-linked 29 |
| 300310 | Agammaglobulinemia, type 2, X-linked |
| 301220 | Partington syndrome II |
| 302350 | Nance-Horan syndrome |
| 304050 | Aicardi syndrome |
| 304110 | Craniofrontonasal dysplasia |
| 306100 | Gonadal dysgenesis, XY female type |
| 309530 | Mental retardation, X-linked 1, non-dysmorphic |
| 309585 | Mental retardation, X-linked, syndromic-6, with gynecomastia and obesity |
| 312040 | N syndrome, 310465 |
| 600101 | Deafness, autosomal dominant 2 |
| 600119 | Muscular dystrophy, Duchenne-like, type 2 |
| 600119 | Adhalinopathy, primary |
| 600140 | Rubenstein-Taybi syndrome, 180849 |
| 600143 | Epilepsy, progressive, with mental retardation |
| 600163 | Long QT syndrome-3 |
| 600175 | Spinal muscular atrophy, congenital nonprogressive, of lower limbs |
| 600243 | Temperature-sensitive apoptosis |
| 600266 | Resistance/susceptibility to TB, etc. |
| 600273 | Polycystic kidney disease, infantile severe, with tuberous sclerosis |
| 600281 | Non-insulin-dependent diabetes mellitus, 125853 |
| 600281 | MODY, type 1, 125850 |
| 600309 | Atrioventricular canal defect-1 |
| 600320 | Insulin-dependent diabetes mellitus-5 |
| 600332 | Rippling muscle disease-1 |
| 600374 | Bardet-Biedl syndrome 4 |
| 600510 | Pigment dispersion syndrome |
| 600525 | Trichodontoosseous syndrome, 190320 |
| 600593 | Craniosynostosis, Adelaide type |
| 600623 | Prostate cancer, 176807 |
| 600650 | Myopathy due to CPT II deficiency, 255110 |
| 600650 | CPT deficiency, hepatic, type II, 600649 |
| 600652 | Deafness, autosomal dominant 4 |
| 600698 | Salivary adenoma |
| 600698 | Uterine leiomyoma |
| 600698 | Lipoma |
| 600698 | Lipomatosis, mutiple, 151900 |
| 600722 | Ceroid lipofuscinosis, neuronal, variant juvenile type, with granular osmiophilic deposits |
| 600722 | Ceroid lipofuscinosis, neuronal-1, infantile, 256730 |
| 600725 | Holoprosencephaly-3, 142945 |
| 600757 | Orofacial cleft-3 |
| 600759 | Alzheimer disease-4 |
| 600808 | Enuresis, nocturnal, 2 |
| 600811 | Xeroderma pigmentosum, group E, DDB-negative subtype, 278740 |
| 600850 | Schizophrenia disorder-4 |
| 600852 | Retinitis pigmentosa-17 |
| 600881 | Cataract, congenital, zonular, with sutural opacities |
| 600882 | Charcot-Marie-Tooth neuropathy-2B |
| 600883 | Diabetes mellitus, insulin-dependent, 8 |
| 600900 | Muscular dystrophy, limb-girdle, type 2E |
| 600957 | Persistent Mullerian duct syndrome, type I, 261550 |
| 600958 | Cardiomyopathy, familial hypertrophic, 4, 115197 |
| 600968 | Gitelman syndrome, 263800 |
| 600971 | Deafness, autosomal recessive 6 |
| 600975 | Glaucoma 3, primary infantile, B |
| 600996 | Arrhythmogenic right ventricular dysplasia-2 |
| 601002 | 5-oxoprolinuria, 266130 |
| 601002 | Hemolytic anemia due to glutathione synthetase deficiency, 231900 |
| 601146 | Brachydactyly, type C, 113100 |
| 601146 | Acromesomelic dysplasia, Hunter-Thompson type, 201250 |
| 601146 | Chondrodysplasia, Grebe type, 200700 |
| 601226 | Progressive external ophthalmoplegia, type 2 |
| 601238 | Cerebellar ataxia, Cayman type |
| 601277 | Ichthyosis, lamellar, type 2 |
| 601284 | Hereditary hemorrhagic telangiectasia-2, 600376 |
| 601313 | Polycystic kidney disease, adult type I, 173900 |
| 601385 | Prostate cancer |
| 601399 | Platelet disorder, familial, with associated myeloid malignancy |
| 601402 | Leukemia, myeloid, acute |
| 601412 | Deafness, autosomal dominant 7 |
| 601414 | Retinitis pigmentosa-18 |
| 601458 | Inflammatory bowel disease-2 |
| 601517 | Spinocerebellar ataxia-2, 183090 |
| 601518 | Prostate cancer, hereditary, 1, 176807 |
| 601623 | Angelman syndrome |
| 601652 | Glaucoma 1A, primary open angle, juvenile-onset, 137750 |
| 601669 | Hirschsprung disease, one form |
| 601744 | Systemic lupus erythematosus, susceptibility to, 1 |
| 601769 | Osteoporosis, involutional |
| 601769 | Rickets, vitamin D-resistant, 277440 |
| 601771 | Glaucoma 3A, primary infantile, 231300 |
| 601780 | Ceroid-lipofuscinosis, neuronal-6, variant late infantile |
| 601785 | Carbohydrate-deficient glycoprotein syndrome, type I, 212065 |
| 601800 | [Hair color, brown] |
| 601844 | Pseudohypoaldosteronism type II |
| 601846 | Muscular dystrophy with rimmed vacuoles |
| 601850 | Retinitis pigmentosa-deafness syndrome |
| 601863 | Bare lymphocyte syndrome, complementation group C |
| 601889 | Lymphoma, diffuse large cell |
| 601954 | Muscular dystrophy, limb-girdle, type 2G |
| 601975 | Ectodermal dysplasia/skin fragility syndrome |
| 602025 | Obesity/hyperinsulinism, susceptibility to |
| 602088 | Nephronophthisis, infantile |
| 602092 | Deafness, autosomal recessive 18 |
| 602094 | Lipodystrophy, familial partial |
| 602116 | Glioma |
| 602117 | Prader-Willi syndrome |
| 602216 | Peutz-Jeghers syndrome, 175200 |
| 602279 | Oculopharyngeal muscular dystorphy, 164300 |
| 602279 | Oculopharyngeal muscular dystrophy, autosomal recessive, 257950 |
| 602363 | Ellis-van Creveld-like syndrome |
| 602403 | Alzheimer disease, susceptibility to |
| 602477 | Febrile convulsions, familial, 2 |
| 602491 | Hyperlipidemia, familial combined, 1 |
| 602544 | Parkinson disease, juvenile, type 2, 600116 |
| 602629 | Dystonia-6, torsion |
| 602772 | Retinitis pitmentosa-24 |

Mature Polypeptides

[0155] The present invention also encompasses mature forms of a polypeptide having the amino acid sequence of SEQ ID NO:Y and/or the amino acid sequence encoded by the cDNA in a deposited clone. Polynucleotides encoding the mature forms (such as, for example, the polynucleotide sequence in SEQ ID NO:X and/or the polynucleotide sequence contained in the cDNA of a deposited clone) are also encompassed by the invention. Moreover, fragments or variants of these polypeptides (such as, fragments as described herein, polypeptides at least 80%, 85%, 90%, 95%, 96%, 97%, 98%, 99%, or 100% identical to these polypeptides, or polypeptides encoded by a polynucleotide that hybridizes under stringent conditions to the complementary strand of the polynucleotide encoding these polypeptides) are also encompassed by the invention. In preferred embodiments, these fragments or variants retain one or more functional acitivities of the full-length or mature form of the polypeptide (e.g., biological activity (such as, for example, activity useful in detecting, preventing, diagnosing, prognosticating, treating, and/or ameliorating allergic and/or asthmatic disorders), antigenicity (ability to bind, or compete with a polypeptide of the invention for binding, to an anti-polypeptide of the invention antibody), immunogenicity (ability to generate antibody which binds to a specific polypeptide of the invention), ability to form multimers with polypeptides of the invention, and ability to bind to a receptor or ligand for a polypeptide of the invention). Antibodies that bind the polypeptides of the invention, and polynucleotides encoding these polypeptides are also encompassed by the invention.

[0156] According to the signal hypothesis, proteins secreted by mammalian cells have a signal or secretary leader sequence that is cleaved from the mature protein once export of the growing protein chain across the rough endoplasmic reticulum has been initiated. Most mammalian cells and even insect cells cleave secreted proteins with the same specificity. However, in some cases, cleavage of a secreted protein is not entirely uniform, which results in two or more mature species of the protein. Further, it has long been known that cleavage specificity of a secreted protein is ultimately determined by the primary structure of the complete protein, that is, it is inherent in the amino acid sequence of the polypeptide.

[0157] Methods for predicting whether a protein has a signal sequence, as well as the cleavage point for that sequence, are available. For instance, the method of McGeoch, Virus Res. 3:271-286 (1985), uses the information from a short N-terminal charged region and a subsequent uncharged region of the complete (uncleaved) protein. The method of von Heinje, Nucleic Acids Res. 14:4683-4690 (1986) uses the information from the residues surrounding the cleavage site, typically residues −13 to +2, where +1 indicates the amino terminus of the secreted protein. The accuracy of predicting the cleavage points of known mammalian secretory proteins for each of these methods is in the range of 75-80%. (von Heinje, supra.) However, the two methods do not always produce the same predicted cleavage point(s) for a given protein.

[0158] In the present case, the deduced amino acid sequence of the secreted polypeptide was analyzed by a computer program called SignalP (Henrik Nielsen et al., Protein Engineering 10:1-6 (1997)), which predicts the cellular location of a protein based on the amino acid sequence. As part of this computational prediction of localization, the methods of McGeoch and von Heinje are incorporated. The analysis of the amino acid sequences of the secreted proteins described herein by this program provided the results shown in Table 1A.

[0159] In specific embodiments, polypeptides of the invention comprise, or alternatively consist of, the predicted mature form of the polypeptide as delineated in columns 14 and 15 of Table 1A. Moreover, fragments or variants of these polypeptides (such as, fragments as described herein, polypeptides at least 80%, 85%, 90%, 95%, 96%, 97%, 98%, 99%, or 100% identical to these polypeptides, or polypeptides encoded by a polynucleotide that hybridizes under stringent conditions to the complementary strand of the polynucleotide encoding these polypeptides) are also encompassed by the invention. In preferred embodiments, these fragments or variants retain one or more functional acitivities of the full-length or mature form of the polypeptide (e.g., biological activity (such as, for example, activity useful in detecting, preventing, diagnosing, prognosticating, treating, and/or ameliorating allergic and/or asthmatic disorders), antigenicity (ability to bind, or compete with a polypeptide of the invention for binding, to an anti-polypeptide of the invention antibody), immunogenicity (ability to generate antibody which binds to a specific polypeptide of the invention), ability to form multimers with polypeptides of the invention, and ability to bind to a receptor or ligand for a polypeptide of the invention). Antibodies that bind the polypeptides of the invention, and polynucleotides encoding these polypeptides are also encompassed by the invention.

[0160] Polynucleotides encoding proteins comprising, or consisting of, the predicted mature form of polypeptides of the invention (e.g., polynucleotides having the sequence of SEQ ID NO: X (Table 1A, column 4), the sequence delineated in columns 7 and 8 of Table 1A, and a sequence encoding the mature polypeptide delineated in columns 14 and 15 of Table 1A (e.g., the sequence of SEQ ID NO:X encoding the mature polypeptide delineated in columns 14 and 15 of Table 1)) are also encompassed by the invention, as are fragments or variants of these polynucleotides (such as, fragments as described herein, polynucleotides at least 80%, 85%, 90%, 95%, 96%, 97%, 98%, 99%, or 100% identical to these polyncueotides, and nucleic acids which hybridizes under stringent conditions to the complementary strand of the polynucleotide).

[0161] As one of ordinary skill would appreciate, however, cleavage sites sometimes vary from organism to organism and cannot be predicted with absolute certainty. Accordingly, the present invention provides secreted polypeptides having a sequence shown in SEQ ID NO:Y which have an N-terminus beginning within 15 residues of the predicted cleavage point (i.e., having 1, 2, 3, 4, 5, 6, 7, 8, 9, 10, 11, 12, 13, 14, or 15 more or less contiguous residues of SEQ ID NO:Y at the N-terminus when compared to the predicted mature form of the polypeptide (e.g., the mature polypeptide delineated in columns 14 and 15 of Table 1). Similarly, it is also recognized that in some cases, cleavage of the signal sequence from a secreted protein is not entirely uniform, resulting in more than one secreted species. These polypeptides, and the polynucleotides encoding such polypeptides, are contemplated by the present invention.

[0162] Moreover, the signal sequence identified by the above analysis may not necessarily predict the naturally occurring signal sequence. For example, the naturally occurring signal sequence may be further upstream from the predicted signal sequence. However, it is likely that the predicted signal sequence will be capable of directing the secreted protein to the ER. Nonetheless, the present invention provides the mature protein produced by expression of the polynucleotide sequence of SEQ ID NO:X and/or the polynucleotide sequence contained in the cDNA of a deposited clone, in a mammalian cell (e.g., COS cells, as desribed below). These polypeptides, and the polynucleotides encoding such polypeptides, are contemplated by the present invention.

Polynucleotide and Polypeptide Variants

[0163] The present invention is also directed to variants of the polynucleotide sequence disclosed in SEQ ID NO:X or the complementary strand thereto, nucleotide sequences encoding the polypeptide of SEQ ID NO:Y, the nucleotide sequence of SEQ ID NO:X that encodes the polypeptide sequence as defined in columns 13 and 14 of Table 1A, nucleotide sequences encoding the polypeptide sequence as defined in columns 13 and 14 of Table 1A, the nucleotide sequence of SEQ ID NO:X encoding the polypeptide sequence as defined in Table 1B, nucleotide sequences encoding the polypeptide as defined in Table 1B, the nucleotide sequence as defined in columns 8 and 9 of Table 2, nucleotide sequences encoding the polypeptide encoded by the nucleotide sequence as defined in columns 8 and 9 of Table 2, the nucleotide sequence as defined in column 6 of Table 1C, nucleotide sequences encoding the polypeptide encoded by the nucleotide sequence as defined in column 6 of Table 1C, the cDNA sequence contained in ATCC™ Deposit No:Z, nucleotide sequences encoding the polypeptide encoded by the cDNA sequence contained in ATCC™ Deposit No:Z, and/or nucleotide sequences encoding a mature (secreted) polypeptide encoded by the cDNA sequence contained in ATCC™ Deposit No:Z.

[0164] The present invention also encompasses variants of the polypeptide sequence disclosed in SEQ ID NO:Y, the polypeptide as defined in columns 13 and 14 of Table 1A, the polypeptide sequence as defined in Table 1B, a polypeptide sequence encoded by the polynucleotide sequence in SEQ ID NO:X, a polypeptide sequence encoded by the nucleotide sequence as defined in columns 8 and 9 of Table 2, a polypeptide sequence encoded by the nucleotide sequence as defined in column 6 of Table 1C, a polypeptide sequence encoded by the complement of the polynucleotide sequence in SEQ ID NO:X, the polypeptide sequence encoded by the cDNA sequence contained in ATCC™ Deposit No:Z and/or a mature (secreted) polypeptide encoded by the cDNA sequence contained in ATCC™ Deposit No:Z.

[0165] “Variant” refers to a polynucleotide or polypeptide differing from the polynucleotide or polypeptide of the present invention, but retaining essential properties thereof. Generally, variants are overall closely similar, and, in many regions, identical to the polynucleotide or polypeptide of the present invention.

[0166] Thus, one aspect of the invention provides an isolated nucleic acid molecule comprising, or alternatively consisting of, a polynucleotide having a nucleotide sequence selected from the group consisting of: (a) a nucleotide sequence described in SEQ ID NO:X or contained in the cDNA sequence of ATCC™ Deposit No:Z; (b) a nucleotide sequence in SEQ ID NO:X or the cDNA in ATCC™ Deposit No:Z which encodes the complete amino acid sequence of SEQ ID NO:Y or the complete amino acid sequence encoded by the cDNA in ATCC™ Deposit No:Z; (c) a nucleotide sequence in SEQ ID NO:X or the cDNA in ATCC™ Deposit No:Z which encodes a mature polypeptide (i.e., a secreted polypeptide (e.g., as delineated in columns 14 and 15 of Table 1A)); (d) a nucleotide sequence in SEQ ID NO:X or the cDNA sequence of ATCC™ Deposit No:Z, which encodes a biologically active fragment of a polypeptide; (e) a nucleotide sequence in SEQ ID NO:X or the cDNA sequence of ATCC™ Deposit No:Z, which encodes an antigenic fragment of a polypeptide; (f) a nucleotide sequence encoding a polypeptide comprising the complete amino acid sequence of SEQ ID NO:Y or the complete amino acid sequence encoded by the cDNA in ATCC™ Deposit No:Z; (g) a nucleotide sequence encoding a mature polypeptide of the amino acid sequence of SEQ ID NO:Y (i.e., a secreted polypeptide (e.g., as delineated in columns 14 and 15 of Table 1A)) or a mature polypeptide of the amino acid sequence encoded by the cDNA in ATCC™ Deposit No:Z; (h) a nucleotide sequence encoding a biologically active fragment of a polypeptide having the complete amino acid sequence of SEQ ID NO:Y or the complete amino acid sequence encoded by the cDNA in ATCC™ Deposit No:Z; (i) a nucleotide sequence encoding an antigenic fragment of a polypeptide having the complete amino acid sequence of SEQ ID) NO:Y or the complete amino acid sequence encoded by the cDNA in ATCC™ Deposit No:Z; and (j) a nucleotide sequence complementary to any of the nucleotide sequences in (a), (b), (c), (d), (e), (f), (g), (h), or (i) above.

[0167] The present invention is also directed to nucleic acid molecules which comprise, or alternatively consist of, a nucleotide sequence which is at least 80%, 85%, 90%, 95%, 96%, 97%, 98%, 99% or 100%, identical to, for example, any of the nucleotide sequences in (a), (b), (c), (d), (e), (f), (g), (h), (i), or (j) above, the nucleotide coding sequence in SEQ ID NO:X or the complementary strand thereto, the nucleotide coding sequence of the cDNA contained in ATCC™ Deposit No:Z or the complementary strand thereto, a nucleotide sequence encoding the polypeptide of SEQ ID NO:Y, a nucleotide sequence encoding a polypeptide sequence encoded by the nucleotide sequence in SEQ ID NO:X, a polypeptide sequence encoded by the complement of the polynucleotide sequence in SEQ ID NO:X, a nucleotide sequence encoding the polypeptide encoded by the cDNA contained in ATCC™ Deposit No:Z, the nucleotide coding sequence in SEQ ID NO:X as defined in columns 8 and 9 of Table 2 or the complementary strand thereto, a nucleotide sequence encoding the polypeptide encoded by the nucleotide sequence in SEQ ID NO:X as defined in columns 8 and 9 of Table 2 or the complementary strand thereto, the nucleotide coding sequence in SEQ ID NO:B as defined in column 6 of Table 1C or the complementary strand thereto, a nucleotide sequence encoding the polypeptide encoded by the nucleotide sequence in SEQ ID NO:B as defined in column 6 of Table 1C or the complementary strand thereto, the nucleotide sequence in SEQ ID NO:X encoding the polypeptide sequence as defined in Table 1B or the complementary strand thereto, nucleotide sequences encoding the polypeptide as defined in Table 1B or the complementary strand thereto, and/or polynucleotide fragments of any of these nucleic acid molecules (e.g., those fragments described herein). Polynucleotides that hybridize to the complement of these nucleic acid molecules under stringent hybridization conditions or alternatively, under lower stringency conditions, are also encompassed by the invention, as are polypeptides encoded by these polynucleotides and nucleic acids.

[0168] In a preferred embodiment, the invention encompasses nucleic acid molecules which comprise, or alternatively, consist of a polynucleotide which hybridizes under stringent hybridization conditions, or alternatively, under lower stringency conditions, to a polynucleotide in (a), (b), (c), (d), (e), (f), (g), (h), or (i), above, as are polypeptides encoded by these polynucleotides. In another preferred embodiment, polynucleotides which hybridize to the complement of these nucleic acid molecules under stringent hybridization conditions, or alternatively, under lower stringency conditions, are also encompassed by the invention, as are polypeptides encoded by these polynucleotides.

[0169] In another embodiment, the invention provides a purified protein comprising, or alternatively consisting of, a polypeptide having an amino acid sequence selected from the group consisting of: (a) the complete amino acid sequence of SEQ ID NO:Y or the complete amino acid sequence encoded by the cDNA in ATCC™ Deposit No:Z; (b) the amino acid sequence of a mature (secreted) form of a polypeptide having the amino acid sequence of SEQ ID NO:Y (e.g., as delineated in columns 14 and 15 of Table 1A) or a mature form of the amino acid sequence encoded by the cDNA in ATCC™ Deposit No:Z mature; (c) the amino acid sequence of a biologically active fragment of a polypeptide having the complete amino acid sequence of SEQ ID NO:Y or the complete amino acid sequence encoded by the cDNA in ATCC™ Deposit No:Z; and (d) the amino acid sequence of an antigenic fragment of a polypeptide having the complete amino acid sequence of SEQ ID NO:Y or the complete amino acid sequence encoded by the cDNA in ATCC™ Deposit No:Z.

[0170] The present invention is also directed to proteins which comprise, or alternatively consist of, an amino acid sequence which is at least 80%, 85%, 90%, 95%, 96%, 97%, 98%, 99% or 100%, identical to, for example, any of the amino acid sequences in (a), (b), (c), or (d), above, the amino acid sequence shown in SEQ ID NO:Y, the amino acid sequence encoded by the cDNA contained in ATCC™ Deposit No:Z, the amino acid sequence of the polypeptide encoded by the nucleotide sequence in SEQ ID NO:X as defined in columns 8 and 9 of Table 2, the amino acid sequence of the polypeptide encoded by the nucleotide sequence in SEQ ID NO:B as defined in column 6 of Table 1C, the amino acid sequence as defined in Table 1B, an amino acid sequence encoded by the nucleotide sequence in SEQ ID NO:X, and an amino acid sequence encoded by the complement of the polynucleotide sequence in SEQ ID NO:X. Fragments of these polypeptides are also provided (e.g., those fragments described herein). Further proteins encoded by polynucleotides that hybridize to the complement of the nucleic acid molecules encoding these amino acid sequences under stringent hybridization conditions or alternatively, under lower stringency conditions, are also encompassed by the invention, as are the polynucleotides encoding these proteins.

[0171] By a nucleic acid having a nucleotide sequence at least, for example, 95% “identical” to a reference nucleotide sequence of the present invention, it is intended that the nucleotide sequence of the nucleic acid is identical to the reference sequence except that the nucleotide sequence may include up to five point mutations per each 100 nucleotides of the reference nucleotide sequence encoding the polypeptide. In other words, to obtain a nucleic acid having a nucleotide sequence at least 95% identical to a reference nucleotide sequence, up to 5% of the nucleotides in the reference sequence may be deleted or substituted with another nucleotide, or a number of nucleotides up to 5% of the total nucleotides in the reference sequence may be inserted into the reference sequence. The query sequence may be an entire sequence referred to in Table 1B or 2 as the ORF (open reading frame), or any fragment specified as described herein.

[0172] As a practical matter, whether any particular nucleic acid molecule or polypeptide is at least 80%, 85%, 90%, 95%, 96%, 97%, 98% or 99% identical to a nucleotide sequence of the present invention can be determined conventionally using known computer programs. A preferred method for determining the best overall match between a query sequence (a sequence of the present invention) and a subject sequence, also referred to as a global sequence alignment, can be determined using the FASTDB computer program based on the algorithm of Brutlag et al. (Comp. App. Biosci. 6:237-245 (1990)). In a sequence alignment the query and subject sequences are both DNA sequences. An RNA sequence can be compared by converting U's to T's. The result of said global sequence alignment is expressed as percent identity. Preferred parameters used in a FASTDB alignment of DNA sequences to calculate percent identity are: Matrix=Unitary, k-tuple=4, Mismatch Penalty=1, Joining Penalty=30, Randomization Group Length=0, Cutoff Score=1, Gap Penalty=5, Gap Size Penalty 0.05, Window Size=500 or the length of the subject nucleotide sequence, whichever is shorter.

[0173] If the subject sequence is shorter than the query sequence because of 5′ or 3′ deletions, not because of internal deletions, a manual correction must be made to the results. This is because the FASTDB program does not account for 5′ and 3′ truncations of the subject sequence when calculating percent identity. For subject sequences truncated at the 5′ or 3′ ends, relative to the query sequence, the percent identity is corrected by calculating the number of bases of the query sequence that are 5′ and 3′ of the subject sequence, which are not matched/aligned, as a percent of the total bases of the query sequence. Whether a nucleotide is matched/aligned is determined by results of the FASTDB sequence alignment. This percentage is then subtracted from the percent identity, calculated by the above FASTDB program using the specified parameters, to arrive at a final percent identity score. This corrected score is what is used for the purposes of the present invention. Only bases outside the 5′ and 3′ bases of the subject sequence, as displayed by the FASTDB alignment, which are not matched/aligned with the query sequence, are calculated for the purposes of manually adjusting the percent identity score.

[0174] For example, a 90 base subject sequence is aligned to a 100 base query sequence to determine percent identity. The deletions occur at the 5′ end of the subject sequence and therefore, the FASTDB alignment does not show a matched/alignment of the first 10 bases at 5′ end. The 10 unpaired bases represent 10% of the sequence (number of bases at the 5′ and 3′ ends not matched/total number of bases in the query sequence) so 10% is subtracted from the percent identity score calculated by the FASTDB program. If the remaining 90 bases were perfectly matched the final percent identity would be 90%. In another example, a 90 base subject sequence is compared with a 100 base query sequence. This time the deletions are internal deletions so that there are no bases on the 5′ or 3′ of the subject sequence that are not matched/aligned with the query. In this case the percent identity calculated by FASTDB is not manually corrected. Once again, only bases 5′ and 3′ of the subject sequence which are not matched/aligned with the query sequence are manually corrected for. No other manual corrections are to be made for the purposes of the present invention.

[0175] By a polypeptide having an amino acid sequence at least, for example, 95% “identical” to a query amino acid sequence of the present invention, it is intended that the amino acid sequence of the subject polypeptide is identical to the query sequence except that the subject polypeptide sequence may include up to five amino acid alterations per each 100 amino acids of the query amino acid sequence. In other words, to obtain a polypeptide having an amino acid sequence at least 95% identical to a query amino acid sequence, up to 5% of the amino acid residues in the subject sequence may be inserted, deleted, (indels) or substituted with another amino acid. These alterations of the reference sequence may occur at the amino or carboxy terminal positions of the reference amino acid sequence or anywhere between those terminal positions, interspersed either individually among residues in the reference sequence or in one or more contiguous groups within the reference sequence.

[0176] As a practical matter, whether any particular polypeptide is at least 80%, 85%, 90%, 95%, 96%, 97%, 98% or 99% identical to, for instance, the amino acid sequence of a polypeptide referred to in Table 1A (e.g., the amino acid sequence delineated in columns 14 and 15) or a fragment thereof, Table 1B.1 (e.g., the amino acid sequence identified in column 6) or a fragment thereof, Table 2 (e.g., the amino acid sequence of the polypeptide encoded by the polynucleotide sequence defined in columns 8 and 9 of Table 2) or a fragment thereof, the amino acid sequence of the polypeptide encoded by the polynucleotide sequence in SEQ ID NO:B as defined in column 6 of Table 1C or a fragment thereof, the amino acid sequence of the polypeptide encoded by the nucleotide sequence in SEQ ID NO:X or a fragment thereof, or the amino acid sequence of the polypeptide encoded by cDNA contained in ATCC™ Deposit No:Z, or a fragment thereof, the amino acid sequence of a mature (secreted) polypeptide encoded by cDNA contained in ATCC™ Deposit No:Z, or a fragment thereof, can be determined conventionally using known computer programs. A preferred method for determining the best overall match between a query sequence (a sequence of the present invention) and a subject sequence, also referred to as a global sequence alignment, can be determined using the FASTDB computer program based on the algorithm of Brutlag et al. (Comp. App. Biosci. 6:237-245 (1990)). In a sequence alignment the query and subject sequences are either both nucleotide sequences or both amino acid sequences. The result of said global sequence alignment is expressed as percent identity. Preferred parameters used in a FASTDB amino acid alignment are: Matrix=PAM 0, k-tuple=2, Mismatch Penalty=1, Joining Penalty=20, Randomization Group Length=0, Cutoff Score=1, Window Size=sequence length, Gap Penalty=5, Gap Size Penalty=0.05, Window Size=500 or the length of the subject amino acid sequence, whichever is shorter.

[0177] If the subject sequence is shorter than the query sequence due to N- or C-terminal deletions, not because of internal deletions, a manual correction must be made to the results. This is because the FASTDB program does not account for N- and C-terminal truncations of the subject sequence when calculating global percent identity. For subject sequences truncated at the N- and C-termini, relative to the query sequence, the percent identity is corrected by calculating the number of residues of the query sequence that are N- and C-terminal of the subject sequence, which are not matched/aligned with a corresponding subject residue, as a percent of the total bases of the query sequence. Whether a residue is matched/aligned is determined by results of the FASTDB sequence alignment. This percentage is then subtracted from the percent identity, calculated by the above FASTDB program using the specified parameters, to arrive at a final percent identity score. This final percent identity score is what is used for the purposes of the present invention. Only residues to the N- and C-termini of the subject sequence, which are not matched/aligned with the query sequence, are considered for the purposes of manually adjusting the percent identity score. That is, only query residue positions outside the farthest N- and C-terminal residues of the subject sequence.

[0178] For example, a 90 amino acid residue subject sequence is aligned with a 100 residue query sequence to determine percent identity. The deletion occurs at the N-terminus of the subject sequence and therefore, the FASTDB alignment does not show a matching/alignment of the first 10 residues at the N-terminus. The 10 unpaired residues represent 10% of the sequence (number of residues at the N- and C-termini not matched/total number of residues in the query sequence) so 10% is subtracted from the percent identity score calculated by the FASTDB program. If the remaining 90 residues were perfectly matched the final percent identity would be 90%. In another example, a 90 residue subject sequence is compared with a 100 residue query sequence. This time the deletions are internal deletions so there are no residues at the N- or C-termini of the subject sequence that are not matched/aligned with the query. In this case the percent identity calculated by FASTDB is not manually corrected. Once again, only residue positions outside the N- and C-terminal ends of the subject sequence, as displayed in the FASTDB alignment, which are not matched/aligned with the query sequnce are manually corrected for. No other manual corrections are to be made for the purposes of the present invention.

[0179] The polynucleotide variants of the invention may contain alterations in the coding regions, non-coding regions, or both. Especially preferred are polynucleotide variants containing alterations that produce silent substitutions, additions, or deletions, but do not alter the properties or activities of the encoded polypeptide. Nucleotide variants produced by silent substitutions due to the degeneracy of the genetic code are preferred. Moreover, polypeptide variants in which less than 50, less than 40, less than 30, less than 20, less than 10, or 5-50, 5-25, 5-10, 1-5, or 1-2 amino acids are substituted, deleted, or added in any combination are also preferred. Polynucleotide variants can be produced for a variety of reasons, e.g., to optimize codon expression for a particular host (change codons in the human mRNA to those preferred by a bacterial host such as E. coli).

[0180] Naturally occurring variants are called “allelic variants,” and refer to one of several alternate forms of a gene occupying a given locus on a chromosome of an organism. (Genes I L Lewin, B., ed., John Wiley & Sons, New York (1985)). These allelic variants can vary at either the polynucleotide and/or polypeptide level and are included in the present invention. Alternatively, non-naturally occurring variants may be produced by mutagenesis techniques or by direct synthesis.

[0181] Using known methods of protein engineering and recombinant DNA technology, variants may be generated to improve or alter the characteristics of the polypeptides of the present invention. For instance, one or more amino acids can be deleted from the N-terminus or C-terminus of the polypeptide of the present invention without substantial loss of biological function. As an example, Ron et al. (J. Biol. Chem. 268: 2984-2988 (1993)) reported variant KGF proteins having heparin binding activity even after deleting 3, 8, or 27 amino-terminal amino acid residues. Similarly, Interferon gamma exhibited up to ten times higher activity after deleting 8-10 amino acid residues from the carboxy terminus of this protein. (Dobeli et al., J. Biotechnology 7:199-216 (1988).)

[0182] Moreover, ample evidence demonstrates that variants often retain a biological activity similar to that of the naturally occurring protein. For example, Gayle and coworkers (J. Biol. Chem. 268:22105-22111 (1993)) conducted extensive mutational analysis of human cytokine IL-1a. They used random mutagenesis to generate over 3,500 individual IL-1a mutants that averaged 2.5 amino acid changes per variant over the entire length of the molecule. Multiple mutations were examined at every possible amino acid position. The investigators found that “[m]ost of the molecule could be altered with little effect on either [binding or biological activity].” In fact, only 23 unique amino acid sequences, out of more than 3,500 nucleotide sequences examined, produced a protein that significantly differed in activity from wild-type.

[0183] Furthermore, even if deleting one or more amino acids from the N-terminus or C-terminus of a polypeptide results in modification or loss of one or more biological functions, other biological activities may still be retained. For example, the ability of a deletion variant to induce and/or to bind antibodies which recognize the secreted form will likely be retained when less than the majority of the residues of the secreted form are removed from the N-terminus or C-terminus. Whether a particular polypeptide lacking N- or C-terminal residues of a protein retains such immunogenic activities can readily be determined by routine methods described herein and otherwise known in the art.

[0184] Thus, the invention further includes polypeptide variants that show a biological or functional activity of the polypeptides of the invention (such as, for example, activity useful in detecting, preventing, diagnosing, prognosticating, treating, and/or ameliorating allergic and/or asthmatic disorders). Such variants include deletions, insertions, inversions, repeats, and substitutions selected according to general rules known in the art so as have little effect on activity.

[0185] The present application is directed to nucleic acid molecules at least 80%, 85%, 90%, 95%, 96%, 97%, 98%, 99% or 100% identical to the nucleic acid sequences disclosed herein, (e.g., encoding a polypeptide having the amino acid sequence of an N and/or C terminal deletion), irrespective of whether they encode a polypeptide having functional activity. This is because even where a particular nucleic acid molecule does not encode a polypeptide having functional activity, one of skill in the art would still know how to use the nucleic acid molecule, for instance, as a hybridization probe or a polymerase chain reaction (PCR) primer. Uses of the nucleic acid molecules of the present invention that do not encode a polypeptide having functional activity include, inter alia, (1) isolating a gene or allelic or splice variants thereof in a cDNA library; (2) in situ hybridization (e.g., “FISH”) to metaphase chromosomal spreads to provide precise chromosomal location of the gene, as described in Verma et al., Human Chromosomes: A Manual of Basic Techniques, Pergamon Press, New York (1988); (3) Northern Blot analysis for detecting mRNA expression in specific tissues (e.g., normal or diseased tissues); and (4) in situ hybridization (e.g., histochemistry) for detecting mRNA expression in specific tissues (e.g., normal or diseased tissues).

[0186] Preferred, however, are nucleic acid molecules having sequences at least 80%, 85%, 90%, 95%, 96%, 97%, 98%, 99% or 100% identical to the nucleic acid sequences disclosed herein, which do, in fact, encode a polypeptide having functional activity. By a polypeptide having “functional activity” is meant, a polypeptide capable of displaying one or more known functional activities associated with a full-length (complete) protein and/or a mature (secreted) protein of the invention. Such functional activities include, but are not limited to, biological activity (such as, for example, activity useful in detecting, preventing, diagnosing, prognosticating, treating, and/or ameliorating allergic and/or asthmatic diseases and disorders), antigenicity (ability to bind, or compete with a polypeptide of the invention for binding, to an anti-polypeptide of the invention antibody), immunogenicity (ability to generate antibody which binds to a specific polypeptide of the invention), ability to form multimers with polypeptides of the invention, and ability to bind to a receptor or ligand for a polypeptide of the invention.

[0187] The functional activity of the polypeptides, and fragments, variants and derivatives of the invention, can be assayed by various methods.

[0188] For example, in one embodiment where one is assaying for the ability to bind or compete with a full-length polypeptide of the present invention for binding to an anti-polypetide antibody, various immunoassays known in the art can be used, including but not limited to, competitive and non-competitive assay systems using techniques such as radioimmunoassays, ELISA (enzyme linked immunosorbent assay), “sandwich” immunoassays, immunoradiometric assays, gel diffusion precipitation reactions, immunodiffusion assays, in situ immunoassays (using colloidal gold, enzyme or radioisotope labels, for example), western blots, precipitation reactions, agglutination assays (e.g., gel agglutination assays, hemagglutination assays), complement fixation assays, immunofluorescence assays, protein A assays, and immunoelectrophoresis assays, etc. In one embodiment, antibody binding is detected by detecting a label on the primary antibody. In another embodiment, the primary antibody is detected by detecting binding of a secondary antibody or reagent to the primary antibody. In a further embodiment, the secondary antibody is labeled. Many means are known in the art for detecting binding in an immunoassay and are within the scope of the present invention.

[0189] In another embodiment, where a ligand is identified, or the ability of a polypeptide fragment, variant or derivative of the invention to multimerize is being evaluated, binding can be assayed, e.g., by means well-known in the art, such as, for example, reducing and non-reducing gel chromatography, protein affinity chromatography, and affinity blotting. See generally, Phizicky et al., Microbiol. Rev. 59:94-123 (1995). In another embodiment, the ability of physiological correlates of a polypeptide of the present invention to bind to a substrate(s) of the polypeptide of the invention can be routinely assayed using techniques known in the art.

[0190] In addition, assays described herein (see Examples) and otherwise known in the art may routinely be applied to measure the ability of polypeptides of the present invention and fragments, variants and derivatives thereof to elicit polypeptide related biological activity (either in vitro or in vivo). Other methods will be known to the skilled artisan and are within the scope of the invention.

[0191] Of course, due to the degeneracy of the genetic code, one of ordinary skill in the art will immediately recognize that a large number of the nucleic acid molecules having a sequence at least 80%, 85%, 90%, 95%, 96%, 97%, 98%, 99%, or 100% identical to, for example, the nucleic acid sequence of the cDNA contained in ATCC™ Deposit No:Z, the nucleic acid sequence referred to in Table 1B (SEQ ID NO:X), the nucleic acid sequence disclosed in Table 1A (e.g., the nucleic acid sequence delineated in columns 7 and 8), the nucleic acid sequence disclosed in Table 2 (e.g., the nucleic acid sequence delineated in columns 8 and 9) or fragments thereof, will encode polypeptides “having functional activity.” In fact, since degenerate variants of any of these nucleotide sequences all encode the same polypeptide, in many instances, this will be clear to the skilled artisan even without performing the above described comparison assay. It will be further recognized in the art that, for such nucleic acid molecules that are not degenerate variants, a reasonable number will also encode a polypeptide having functional activity. This is because the skilled artisan is fully aware of amino acid substitutions that are either less likely or not likely to significantly effect protein function (e.g., replacing one aliphatic amino acid with a second aliphatic amino acid), as further described below.

[0192] For example, guidance concerning how to make phenotypically silent amino acid substitutions is provided in Bowie et al., “Deciphering the Message in Protein Sequences: Tolerance to Amino Acid Substitutions,” Science 247:1306-1310 (1990), wherein the authors indicate that there are two main strategies for studying the tolerance of an amino acid sequence to change.

[0193] The first strategy exploits the tolerance of amino acid substitutions by natural selection during the process of evolution. By comparing amino acid sequences in different species, conserved amino acids can be identified. These conserved amino acids are likely important for protein function. In contrast, the amino acid positions where substitutions have been tolerated by natural selection indicates that these positions are not critical for protein function. Thus, positions tolerating amino acid substitution could be modified while still maintaining biological activity of the protein.

[0194] The second strategy uses genetic engineering to introduce amino acid changes at specific positions of a cloned gene to identify regions critical for protein function. For example, site directed mutagenesis or alanine-scanning mutagenesis (introduction of single alanine mutations at every residue in the molecule) can be used. See Cunningham and Wells, Science 244:1081-1085 (1989). The resulting mutant molecules can then be tested for biological activity.

[0195] As the authors state, these two strategies have revealed that proteins are surprisingly tolerant of amino acid substitutions. The authors further indicate which amino acid changes are likely to be permissive at certain amino acid positions in the protein. For example, most buried (within the tertiary structure of the protein) amino acid residues require nonpolar side chains, whereas few features of surface side chains are generally conserved. Moreover, tolerated conservative amino acid substitutions involve replacement of the aliphatic or hydrophobic amino acids Ala, Val, Leu and Ile; replacement of the hydroxyl residues Ser and Thr; replacement of the acidic residues Asp and Glu; replacement of the amide residues Asn and Gln, replacement of the basic residues Lys, Arg, and His; replacement of the aromatic residues Phe, Tyr, and Trp, and replacement of the small-sized amino acids Ala, Ser, Thr, Met, and Gly.

[0196] Besides conservative amino acid substitution, variants of the present invention include (i) substitutions with one or more of the non-conserved amino acid residues, where the substituted amino acid residues may or may not be one encoded by the genetic code, or (ii) substitutions with one or more of the amino acid residues having a substituent group, or (iii) fusion of the mature polypeptide with another compound, such as a compound to increase the stability and/or solubility of the polypeptide (for example, polyethylene glycol), (iv) fusion of the polypeptide with additional amino acids, such as, for example, an IgG Fc fusion region peptide, serum albumin (preferably human serum albumin) or a fragment thereof, or leader or secretory sequence, or a sequence facilitating purification, or (v) fusion of the polypeptide with another compound, such as albumin (including but not limited to recombinant albumin (see, e.g., U.S. Pat. No. 5,876,969, issued Mar. 2, 1999, EP Patent 0 413 622, and U.S. Pat. No. 5,766,883, issued Jun. 16, 1998, herein incorporated by reference in their entirety)). Such variant polypeptides are deemed to be within the scope of those skilled in the art from the teachings herein.

[0197] For example, polypeptide variants containing amino acid substitutions of charged amino acids with other charged or neutral amino acids may produce proteins with improved characteristics, such as less aggregation. Aggregation of pharmaceutical formulations both reduces activity and increases clearance due to the aggregate's immunogenic activity. See Pinckard et al., Clin. Exp. Immunol. 2:331-340 (1967); Robbins et al., Diabetes 36: 838-845 (1987); Cleland et al., Crit. Rev. Therapeutic Drug Carrier Systems 10:307-377 (1993).

[0198] A further embodiment of the invention relates to polypeptides which comprise the amino acid sequence of a polypeptide having an amino acid sequence which contains at least one amino acid substitution, but not more than 50 amino acid substitutions, even more preferably, not more than 40 amino acid substitutions, still more preferably, not more than 30 amino acid substitutions, and still even more preferably, not more than 20 amino acid substitutions from a polypeptide sequence disclosed herein. Of course it is highly preferable for a polypeptide to have an amino acid sequence which, for example, comprises the amino acid sequence of a polypeptide of SEQ ID NO:Y, the amino acid sequence of the mature (e.g., secreted) polypeptide of SEQ ID NO:Y, an amino acid sequence encoded by SEQ ID NO:X, an amino acid sequence encoded by the portion of SEQ ID NO:X as defined in columnns 8 and 9 of Table 2, an amino acid sequence encoded by the complement of SEQ ID NO:X, an amino acid sequence encoded by cDNA contained in ATCC™ Deposit No:Z, and/or the amino acid sequence of a mature (secreted) polypeptide encoded by cDNA contained in ATCC™ Deposit No:Z, or a fragment thereof, which contains, in order of ever-increasing preference, at least one, but not more than 10, 9, 8, 7, 6, 5, 4, 3, 2 or 1 amino acid substitutions.

[0199] In specific embodiments, the polypeptides of the invention comprise, or alternatively, consist of, fragments or variants of a reference amino acid sequence selected from: (a) the amino acid sequence of SEQ ID NO:Y or fragments thereof (e.g., the mature form and/or other fragments described herein); (b) the amino acid sequence encoded by SEQ ID NO:X or fragments thereof, (c) the amino acid sequence encoded by the complement of SEQ ID NO:X or fragments thereof, (d) the amino acid sequence encoded by the portion of SEQ ID NO:X as defined in columns 8 and 9 of Table 2 or fragments thereof; and (e) the amino acid sequence encoded by cDNA contained in ATCC™ Deposit No:Z or fragments thereof, wherein the fragments or variants have 1-5, 5-10, 5-25, 5-50, 10-50 or 50-150, amino acid residue additions, substitutions, and/or deletions when compared to the reference amino acid sequence. In preferred embodiments, the amino acid substitutions are conservative. Polynucleotides encoding these polypeptides are also encompassed by the invention.

Polynucleotide and Polypeptide Fragments

[0200] The present invention is also directed to polynucleotide fragments of the polynucleotides (nucleic acids) of the invention. In the present invention, a “polynucleotide fragment” refers to a polynucleotide having a nucleic acid sequence which, for example: is a portion of the cDNA contained in ATCC™ Deposit No:Z or the complementary strand thereto; is a portion of the polynucleotide sequence encoding the polypeptide encoded by the cDNA contained in ATCC™ Deposit No:Z or the complementary strand thereto; is a portion of the polynucleotide sequence encoding the mature (secreted) polypeptide encoded by the cDNA contained in ATCC™ Deposit No:Z or the complementary strand thereto; is a portion of a polynucleotide sequence encoding the mature amino acid sequence as defined in columns 14 and 15 of Table 1A or the complementary strand thereto; is a portion of a polynucleotide sequence encoding the amino acid sequence encoded by the region of SEQ ID NO:X as defined in columns 8 and 9 of Table 2 or the complementary strand thereto; is a portion of the polynucleotide sequence of SEQ ID NO:X as defined in columns 8 and 9 of Table 2 or the complementary strand thereto; is a portion of the polynucleotide sequence in SEQ ID NO:X or the complementary strand thereto; is a polynucleotide sequence encoding a portion of the polypeptide of SEQ ID NO:Y; is a polynucleotide sequence encoding a portion of a polypeptide encoded by SEQ ID NO:X; is a polynucleotide sequence encoding a portion of a polypeptide encoded by the complement of the polynucleotide sequence in SEQ ID NO:X; is a portion of a polynucleotide sequence encoding the amino acid sequence encoded by the region of SEQ ID NO:B as defined in column 6 of Table 1C or the complementary strand thereto; or is a portion of the polynucleotide sequence of SEQ ID NO:B as defined in column 6 of Table 1C or the complementary strand thereto.

[0201] The polynucleotide fragments of the invention are preferably at least about 15 nt, and more preferably at least about 20 nt, still more preferably at least about 30 nt, and even more preferably, at least about 40 nt, at least about 50 nt, at least about 75 nt, or at least about 150 nt in length. A fragment “at least 20 nt in length,” for example, is intended to include 20 or more contiguous bases from the cDNA sequence contained in ATCC™ Deposit No:Z, or the nucleotide sequence shown in SEQ ID NO:X or the complementary stand thereto. In this context “about” includes the particularly recited value or a value larger or smaller by several (5, 4, 3, 2, or 1) nucleotides, at either terminus or at both termini. These nucleotide fragments have uses that include, but are not limited to, as diagnostic probes and primers as discussed herein. Of course, larger fragments (e.g., at least 160, 170, 180, 190, 200, 250, 500, 600, 1000, or 2000 nucleotides in length) are also encompassed by the invention.

[0202] Moreover, representative examples of polynucleotide fragments of the invention comprise, or alternatively consist of, a sequence from about nucleotide number 1-50, 51-100, 101-150, 151-200, 201-250, 251-300, 301-350, 351-400, 401-450, 451-500, 501-550, 551-600, 601-650, 651-700, 701-750, 751-800, 801-850, 851-900, 901-950, 951-1000, 1001-1050, 1051-1100, 1101-1150, 1151-1200, 1201-1250, 1251-1300, 1301-1350, 1351-1400, 1401-1450, 1451-1500, 1501-1550, 1551-1600, 1601-1650, 1651-1700, 1701-1750, 1751-1800, 1801-1850, 1851-1900, 1901-1950, 1951-2000, 2001-2050, 2051-2100, 2101-2150, 2151-2200, 2201-2250, 2251-2300, 2301-2350, 2351-2400, 2401-2450, 2451-2500, 2501-2550, 2551-2600, 2601-2650, 2651-2700, 2701-2750, 2751-2800, 2801-2850, 2851-2900, 2901-2950, 2951-3000, 3001-3050, 3051-3100, 3101-3150, 3151-3200, 3201-3250, 3251-3300, 3301-3350, 3351-3400, 3401-3450, 3451-3500, 3501-3550, 3551-3600, 3601-3650, 3651-3700, 3701-3750, 3751-3800, 3801-3850, 3851-3900, 3901-3950, 3951-4000, 4001-4050, 4051-4100, 4101-4150, 4151-4200, 4201-4250, 4251-4300, 4301-4350, 4351-4400, 4401-4450, 4451-4500, 4501-4550, 4551-4600, 4601-4650, 4651-4700, 4701-4750, 4751-4800, 4801-4850, 4851-4900, 4901-4950, 4951-5000, 5001-5050, 5051-5100, 5101-5150, 5151-5200, 5201-5250, 5251-5300, 5301-5350, 5351-5400, 5401-5450, 5451-5500, 5501-5550, 5551-5600, 5601-5650, 5651-5700, 5701-5750, 5751-5800, 5801-5850, 5851-5900, 5901-5950, 5951-6000, 6001-6050, 6051-6100, 6101-6150, 6151-6200, 6201-6250, 6251-6300, 6301-6350, 6351-6400, 6401-6450, 6451-6500, 6501-6550, 6551-6600, 6601-6650, 6651-6700, 6701-6750, 6751-6800, 6801-6850, 6851-6900, 6901-6950, 6951-7000, 7001-7050, 7051-7100, 7101-7150, 7151-7200, 7201-7250, 7251-7300 or 7301 to the end of SEQ ID NO:Y, or the complementary strand thereto. In this context “about” includes the particularly recited range or a range larger or smaller by several (5, 4, 3, 2, or 1) nucleotides, at either terminus or at both termini. Preferably, these fragments encode a polypeptide that has a functional activity (e.g., biological activity; such as, for example, activity useful in detecting, preventing, diagnosing, prognosticating, treating, and/or ameliorating allergic and/or asthmatic diseases and disorders). More preferably, these polynucleotides can be used as probes or primers as discussed herein. Polynucleotides which hybridize to one or more of these polynucleotides under stringent hybridization conditions or alternatively, under lower stringency conditions are also encompassed by the invention, as are polypeptides encoded by these polynucleotides.

[0203] Further representative examples of polynucleotide fragments of the invention comprise, or alternatively consist of, a sequence from about nucleotide number 1-50, 51-100, 101-150, 151-200, 201-250, 251-300, 301-350, 351-400, 401-450, 451-500, 501-550, 551-600, 601-650, 651-700, 701-750, 751-800, 801-850, 851-900, 901-950, 951-1000, 1001-1050, 1051-1100, 1101-1150, 1151-1200, 1201-1250, 1251-1300, 1301-1350, 1351-1400, 1401-1450, 1451-1500, 1501-1550, 1551-1600, 1601-1650, 1651-1700, 1701-1750, 1751-1800, 1801-1850, 1851-1900, 1901-1950, 1951-2000, 2001-2050, 2051-2100, 2101-2150, 2151-2200, 2201-2250, 2251-2300, 2301-2350, 2351-2400, 2401-2450, 2451-2500, 2501-2550, 2551-2600, 2601-2650, 2651-2700, 2701-2750, 2751-2800, 2801-2850, 2851-2900, 2901-2950, 2951-3000, 3001-3050, 3051-3100, 3101-3150, 3151-3200, 3201-3250, 3251-3300, 3301-3350, 3351-3400, 3401-3450, 3451-3500, 3501-3550, 3551-3600, 3601-3650, 3651-3700, 3701-3750, 3751-3800, 3801-3850, 3851-3900, 3901-3950, 3951-4000, 4001-4050, 4051-4100, 4101-4150, 4151-4200, 4201-4250, 4251-4300, 4301-4350, 4351-4400, 4401-4450, 4451-4500, 4501-4550, 4551-4600, 4601-4650, 4651-4700, 4701-4750, 4751-4800, 4801-4850, 4851-4900, 4901-4950, 4951-5000, 5001-5050, 5051-5100, 5101-5150, 5151-5200, 5201-5250, 5251-5300, 5301-5350, 5351-5400, 5401-5450, 5451-5500, 5501-5550, 5551-5600, 5601-5650, 5651-5700, 5701-5750, 5751-5800, 5801-5850, 5851-5900, 5901-5950, 5951-6000, 6001-6050, 6051-6100, 6101-6150, 6151-6200, 6201-6250, 6251-6300, 6301-6350, 6351-6400, 6401-6450, 6451-6500, 6501-6550, 6551-6600, 6601-6650, 6651-6700, 6701-6750, 6751-6800, 6801-6850, 6851-6900, 6901-6950, 6951-7000, 7001-7050, 7051-7100, 7101-7150, 7151-7200, 7201-7250, 7251-7300 or 7301 to the end of the cDNA sequence contained in ATCC™ Deposit No:Z, or the complementary strand thereto. In this context “about” includes the particularly recited range or a range larger or smaller by several (5, 4, 3, 2, or 1) nucleotides, at either terminus or at both termini. Preferably, these fragments encode a polypeptide that has a functional activity (e.g., biological activity). More preferably, these polynucleotides can be used as probes or primers as discussed herein. Polynucleotides which hybridize to one or more of these polynucleotides under stringent hybridization conditions or alternatively, under lower stringency conditions are also encompassed by the invention, as are polypeptides encoded by these polynucleotides.

[0204] Moreover, representative examples of polynucleotide fragments of the invention comprise, or alternatively consist of, a nucleic acid sequence comprising one, two, three, four, five, six, seven, eight, nine, ten, or more of the above described polynucleotide fragments of the invention in combination with a polynucleotide sequence delineated in Table 1C column 6. Additional, representative examples of polynucleotide fragments of the invention comprise, or alternatively consist of, a nucleic acid sequence comprising one, two, three, four, five, six, seven, eight, nine, ten, or more of the above described polynucleotide fragments of the invention in combination with a polynucleotide sequence that is the complementary strand of a sequence delineated in column 6 of Table 1C. In further embodiments, the above-described polynucleotide fragments of the invention comprise, or alternatively consist of, sequences delineated in Table 1C, column 6, and have a nucleic acid sequence which is different from that of the BAC fragment having the sequence disclosed in SEQ ID NO:B (see Table 1C, column 5). In additional embodiments, the above-described polynucleotide fragments of the invention comprise, or alternatively consist of, sequences delineated in Table 1C, column 6, and have a nucleic acid sequence which is different from that published for the BAC clone identified as BAC ID NO:A (see Table 1C, column 4). In additional embodiments, the above-described polynucleotides of the invention comprise, or alternatively consist of, sequences delineated Table 1C, column 6, and have a nucleic acid sequence which is different from that contained in the BAC clone identified as BAC ID NO:A (see Table 1C, column 4). Polypeptides encoded by these polynucleotides, other polynucleotides that encode these polypeptides, and antibodies that bind these polypeptides are also encompassed by the invention. Additionally, fragments and variants of the above-described polynucleotides and polypeptides are also encompassed by the invention.

[0205] In additional specific embodiments, polynucleotides of the invention comprise, or alternatively consist of, one, two, three, four, five, six, seven, eight, nine, ten, or more fragments of the sequences delineated in column 6 of Table 1C, and the polynucleotide sequence of SEQ ID NO:X (e.g., as defined in Table 1C, column 2) or fragments or variants thereof. Polypeptides encoded by these polynucleotides, other polynucleotides that encode these polypeptides, and antibodies that bind these polypeptides are also encompassed by the invention.

[0206] In additional specific embodiments, polynucleotides of the invention comprise, or alternatively consist of, one, two, three, four, five, six, seven, eight, nine, ten, or more fragments of the sequences delineated in column 6 of Table 1C which correspond to the same ATCC™ Deposit No:Z (see Table 1C, column 1), and the polynucleotide sequence of SEQ ID NO:X (e.g., as defined in Table 1A, 1B, or 1C) or fragments or variants thereof. Polypeptides encoded by these polynucleotides, other polynucleotides that encode these polypeptides, and antibodies that bind these polypeptides are also encompassed by the invention.

[0207] In further specific embodiments, polynucleotides of the invention comprise, or alternatively consist of, one, two, three, four, five, six, seven, eight, nine, ten, or more fragments of the sequences delineated in the same row of column 6 of Table 1C, and the polynucleotide sequence of SEQ ID NO:X (e.g., as defined in Table 1A, 1B, or 1C) or fragments or variants thereof. Polypeptides encoded by these polynucleotides, other polynucleotides that encode these polypeptides, and antibodies that bind these polypeptides are also encompassed by the invention.

[0208] In additional specific embodiments, polynucleotides of the invention comprise, or alternatively consist of a polynucleotide sequence in which the 3′ 10 polynucleotides of one of the sequences delineated in column 6 of Table 1C and the 5′ 10 polynucleotides of the sequence of SEQ ID NO:X are directly contiguous. Nucleic acids that hybridize to the complement of these 20 contiguous polynucleotides under stringent hybridization conditions or alternatively, under lower stringency conditions, are also encompassed by the invention. Polypeptides encoded by these polynucleotides and/or nucleic acids, other polynucleotides and/or nucleic acids that encode these polypeptides, and antibodies that bind these polypeptides are also encompassed by the invention. Additionally, fragments and variants of the above-described polynucleotides, nucleic acids, and polypeptides are also encompassed by the invention.

[0209] In additional specific embodiments, polynucleotides of the invention comprise, or alternatively consist of a polynucleotide sequence in which the 3′ 10 polynucleotides of one of the sequences delineated in column 6 of Table 1C and the 5′ 10 polynucleotides of a fragment or variant of the sequence of SEQ ID NO:X (e.g., as described herein) are directly contiguous Nucleic acids which hybridize to the complement of these 20 contiguous polynucleotides under stringent hybridization conditions or alternatively, under lower stringency conditions, are also encompassed by the invention. Polypeptides encoded by these polynucleotides and/or nucleic acids, other polynucleotides and/or nucleic acids encoding these polypeptides, and antibodies that bind these polypeptides are also encompassed by the invention. Additionally, fragments and variants of the above-described polynucleotides, nucleic acids, and polypeptides are also encompassed by the invention.

[0210] In further specific embodiments, polynucleotides of the invention comprise, or alternatively consist of a polynucleotide sequence in which the 3′ 10 polynucleotides of a fragment or variant of the sequence of SEQ ID NO:X and the 5′ 10 polynucleotides of the sequence of one of the sequences delineated in column 6 of Table 1C are directly contiguous. Nucleic acids that hybridize to the complement of these 20 contiguous polynucleotides under stringent hybridization conditions or alternatively, under lower stringency conditions, are also encompassed by the invention. Polypeptides encoded by these polynucleotides and/or nucleic acids, other polynucleotides and/or nucleic acids encoding these polypeptides, and antibodies that bind these polypeptides are also encompassed by the invention. Additionally, fragments and variants of the above-described polynucleotides, nucleic acids, and polypeptides are also encompassed by the invention.

[0211] In specific embodiments, polynucleotides of the invention comprise, or alternatively consist of a polynucleotide sequence in which the 3′ 10 polynucleotides of one of the sequences delineated in column 6 of Table 1C and the 5′ 10 polynucleotides of another sequence in column 6 are directly contiguous. In preferred embodiments, the 3′ 10 polynucleotides of one of the sequences delineated in column 6 of Table 1C is directly contiguous with the 5′ 10 polynucleotides of the next sequential exon delineated in Table 1C, column 6. Nucleic acids that hybridize to the complement of these 20 contiguous polynucleotides under stringent hybridization conditions or alternatively, under lower stringency conditions, are also encompassed by the invention. Polypeptides encoded by these polynucleotides and/or nucleic acids, other polynucleotides and/or nucleic acids encoding these polypeptides, and antibodies that bind these polypeptides are also encompassed by the invention. Additionally, fragments and variants of the above-described polynucleotides, nucleic acids, and polypeptides are also encompassed by the invention.

[0212] In the present invention, a “polypeptide fragment” refers to an amino acid sequence which is a portion of the amino acid sequence contained in SEQ ID NO:Y, is a portion of the mature form of SEQ ID NO:Y as defined in columns 14 and 15 of Table 1A, a portion of an amino acid sequence encoded by the portion of SEQ ID NO:X as defined in columnns 8 and 9 of Table 2, is a portion of an amino acid sequence encoded by the polynucleotide sequence of SEQ ID NO:X, is a portion of an amino acid sequence encoded by the complement of the polynucleotide sequence in SEQ ID NO:X is a portion of the amino acid sequence of a mature (secreted) polypeptide encoded by the cDNA contained in ATCC™ Deposit No:Z, and/or is a portion of an amino acid sequence encoded by the cDNA contained in ATCC™ Deposit No:Z. Protein (polypeptide) fragments may be “free-standing,” or comprised within a larger polypeptide of which the fragment forms a part or region, most preferably as a single continuous region. Representative examples of polypeptide fragments of the invention, include, for example, fragments comprising, or alternatively consisting of, from about amino acid number 1-20, 21-40, 41-60, 61-80, 81-100, 101-120, 121-140, 141-160, 161-180, 181-200, 201-220, 221-240, 241-260, 261-280, 281-300, 301-320, 321-340, 341-360, 361-380, 381-400, 401-420, 421-440, 441-460, 461-480, 481-500, 501-520, 521-540, 541-560, 561-580, 581-600, 601-620, 621-640, 641-660, 661-680, 681-700, 701-720, 721-740, 741-760, 761-780, 781-800, 801-820, 821-840, 841-860, 861-880, 881-900, 901-920, 921-940, 941-960, 961-980, 981-1000, 1001-1020, 1021-1040, 1041-1060, 1061-1080, 1081-1100, 1101-1120, 1121-1140, 1141-1160, 1161-1180, 1181-1200, 1201-1220, 1221-1240, 1241-1260, 1261-1280, 1281-1300, 1301-1320, 1321-1340, 1341-1360, 1361-1380, 1381-1400, 1401-1420, 1421-1440,or 1441 to the end of the coding region of cDNA and SEQ ID NO: Y. In a preferred embodiment, polypeptide fragments of the invention include, for example, fragments comprising, or alternatively consisting of, from about amino acid number 1-20, 21-40, 41-60, 61-80, 81-100, 101-120, 121-140, 141-160, 161-180, 181-200, 201-220, 221-240, 241-260, 261-280, 281-300, 301-320, 321-340, 341-360, 361-380, 381-400, 401-420, 421-440, 441-460, 461-480, 481-500, 501-520, 521-540, 541-560, 561-580, 581-600, 601-620, 621640, 641-660, 661-680, 681-700, 701-720, 721-740, 741-760, 761-780, 781-800, 801-820, 821-840, 841-860, 861-880, 881-900, 901-920, 921-940, 941-960, 961-980, 981-1000, 1001-1020, 1021-1040, 1041-1060, 1061-1080, 1081-1100, 1101-1120, 1121-1140, 1141-1160, 1161-1180, 1181-1200, 1201-1220, 1221-1240, 1241-1260, 1261-1280, 1281-1300, 1301-1320, 1321-1340, 1341-1360, 1361-1380, 1381-1400, 1401-1420, 1421-1440, or 1441 to the end of the coding region of SEQ ID NO:Y. Moreover, polypeptide fragments of the invention may be at least about 10, 15, 20, 25, 30, 35, 40, 45, 50, 55, 60, 65, 70, 75, 80, 85, 90, 100, 110, 120, 130, 140, or 150 amino acids in length. In this context “about” includes the particularly recited ranges or values, or ranges or values larger or smaller by several (5, 4, 3, 2, or 1) amino acids, at either extreme or at both extremes. Polynucleotides encoding these polypeptide fragments are also encompassed by the invention.

[0213] Even if deletion of one or more amino acids from the N-terminus of a protein results in modification of loss of one or more biological functions of the protein, other functional activities (e.g., biological activities; such as, for example, activity useful in detecting, preventing, diagnosing, prognosticating, treating, and/or ameliorating allergic and/or asthmatic diseases and disorders; ability to multimerize; ability to bind a ligand; antigenic ability useful for production of polypeptide specific antibodies) may still be retained. For example, the ability of shortened muteins to induce and/or bind to antibodies which recognize the complete or mature forms of the polypeptides generally will be retained when less than the majority of the residues of the complete or mature polypeptide are removed from the N-terminus. Whether a particular polypeptide lacking N-terminal residues of a complete polypeptide retains such immunologic activities can readily be determined by routine methods described herein and otherwise known in the art. It is not unlikely that a mutein with a large number of deleted N-terminal amino acid residues may retain some biological or immunogenic activities. In fact, peptides composed of as few as six amino acid residues may often evoke an immune response.

[0214] Accordingly, polypeptide fragments include the secreted protein as well as the mature form. Further preferred polypeptide fragments include the secreted protein or the mature form having a continuous series of deleted residues from the amino or the carboxy terminus, or both. For example, any number of amino acids, ranging from 1-60, can be deleted from the amino terminus of either the secreted polypeptide or the mature form. Similarly, any number of amino acids, ranging from 1-30, can be deleted from the carboxy terminus of the secreted protein or mature form. Furthermore, any combination of the above amino and carboxy terminus deletions are preferred. Similarly, polynucleotides encoding these polypeptide fragments are also preferred.

[0215] The present invention further provides polypeptides having one or more residues deleted from the amino terminus of the amino acid sequence of a polypeptide disclosed herein (e.g., a polypeptide of SEQ ID NO:Y, a polypeptide as defined in columns 14 and 15 of Table 1A, a polypeptide encoded by the polynucleotide sequence contained in SEQ ID NO:X or the complement thereof, a polypeptide encoded by the portion of SEQ ID NO:X as defined in columns 8 and 9 of Table 2, a polypeptide encoded by the portion of SEQ ID NO:B as defined in column 6 of Table 1C, a polypeptide encoded by the cDNA contained in ATCC™ Deposit No:Z, and/or a mature polypeptide encoded by the cDNA contained in ATCC™ Deposit No:Z). In particular, N-terminal deletions may be described by the general formula m−q, where q is a whole integer representing the total number of amino acid residues in a polypeptide of the invention (e.g., the polypeptide disclosed in SEQ ID NO:Y, the mature (secreted) portion of SEQ ID NO:Y as defined in columns 14 and 15 of Table 1A, or the polypeptide encoded by the portion of SEQ ID NO:X as defined in columns 8 and 9 of Table 2), and m is defined as any integer ranging from 2 to q−6. Polynucleotides encoding these polypeptides are also encompassed by the invention.

[0216] The present invention further provides polypeptides having one or more residues from the carboxy terminus of the amino acid sequence of a polypeptide disclosed herein (e.g., a polypeptide of SEQ ID NO:Y, the mature (secreted) portion of SEQ ID NO:Y as defined in columns 14 and 15 of Table 1A, a polypeptide encoded by the polynucleotide sequence contained in SEQ ID NO:X, a polypeptide encoded by the portion of SEQ ID NO:X as defined in columns 8 and 9 of Table 2, a polypeptide encoded by the portion of SEQ ID NO:B as defined in column 6 of Table 1C, a polypeptide encoded by the cDNA contained in ATCC™ Deposit No:Z, and/or a mature polypeptide encoded by the cDNA contained in ATCC™ Deposit No:Z). In particular, C-terminal deletions may be described by the general formula 1−n, where n is any whole integer ranging from 6 to q−1, and where n corresponds to the position of amino acid residue in a polypeptide of the invention. Polynucleotides encoding these polypeptides are also encompassed by the invention.

[0217] In addition, any of the N- or C-terminal deletions described above can be combined to produce a N- and C-terminal deleted polypeptide. The invention also provides polypeptides having one or more amino acids deleted from both the amino and the carboxyl termini, which may be described generally as having residues m−n of a polypeptide encoded by SEQ ID NO:X (e.g., including, but not limited to, the preferred polypeptide disclosed as SEQ ID NO:Y, the mature (secreted) portion of SEQ ID NO:Y as defined in columns 14 and 15 of Table 1A, and the polypeptide encoded by the portion of SEQ ID NO:X as defined in columns 8 and 9 of Table 2), the cDNA contained in ATCC™ Deposit No:Z, and/or the complement thereof, where n and m are integers as described above. Polynucleotides encoding these polypeptides are also encompassed by the invention.

[0218] Also as mentioned above, even if deletion of one or more amino acids from the C-terminus of a protein results in modification of loss of one or more biological functions of the protein, other functional activities (e.g., biological activities such as, for example, activity useful in detecting, preventing, diagnosing, prognosticating, treating, and/or ameliorating allergic and/or asthmatic diseases and disorders; ability to multimerize; ability to bind a ligand; antigenic ability useful for production of polypeptide specific antibodies) may still be retained. For example the ability of the shortened mutein to induce and/or bind to antibodies which recognize the complete or mature forms of the polypeptide generally will be retained when less than the majority of the residues of the complete or mature polypeptide are removed from the C-terminus. Whether a particular polypeptide lacking C-terminal residues of a complete polypeptide retains such immunologic activities can readily be determined by routine methods described herein and otherwise known in the art. It is not unlikely that a mutein with a large number of deleted C-terminal amino acid residues may retain some biological or immunogenic activities. In fact, peptides composed of as few as six amino acid residues may often evoke an immune response.

[0219] The present application is also directed to proteins containing polypeptides at least 80%, 85%, 90%, 95%, 96%, 97%, 98% or 99% identical to a polypeptide sequence set forth herein. In preferred embodiments, the application is directed to proteins containing polypeptides at least 80%, 85%, 90%, 95%, 96%, 97%, 98% or 99% identical to polypeptides having the amino acid sequence of the specific N- and C-terminal deletions. Polynucleotides encoding these polypeptides are also encompassed by the invention.

[0220] Any polypeptide sequence encoded by, for example, the polynucleotide sequences set forth as SEQ ID NO:X or the complement thereof, (presented, for example, in Tables 1A and 2), the cDNA contained in ATCC™ Deposit No:Z, or the polynucleotide sequence as defined in column 6 of Table 1C, may be analyzed to determine certain preferred regions of the polypeptide. For example, the amino acid sequence of a polypeptide encoded by a polynucleotide sequence of SEQ ID NO:X (e.g., the polypeptide of SEQ ID NO:Y and the polypeptide encoded by the portion of SEQ ID NO:X as defined in columnns 8 and 9 of Table 2) or the cDNA contained in ATCC™ Deposit No:Z may be analyzed using the default parameters of the DNASTAR computer algorithm (DNASTAR, Inc., 1228 S. Park St., Madison, Wis. 53715 USA; http://www.dnastar.com/).

[0221] Polypeptide regions that may be routinely obtained using the DNASTAR computer algorithm include, but are not limited to, Garnier-Robson alpha-regions, beta-regions, turn-regions, and coil-regions; Chou-Fasman alpha-regions, beta-regions, and turn-regions; Kyte-Doolittle hydrophilic regions and hydrophobic regions; Eisenberg alpha- and beta-amphipathic regions; Karplus-Schulz flexible regions; Emini surface-forming regions; and Jameson-Wolf regions of high antigenic index. Among highly preferred polynucleotides of the invention in this regard are those that encode polypeptides comprising regions that combine several structural features, such as several (e.g., 1, 2, 3 or 4) of the features set out above.

[0222] Additionally, Kyte-Doolittle hydrophilic regions and hydrophobic regions, Emini surface-forming regions, and Jameson-Wolf regions of high antigenic index (i.e., containing four or more contiguous amino acids having an antigenic index of greater than or equal to 1.5, as identified using the default parameters of the Jameson-Wolf program) can routinely be used to determine polypeptide regions that exhibit a high degree of potential for antigenicity. Regions of high antigenicity are determined from data by DNASTAR analysis by choosing values that represent regions of the polypeptide which are likely to be exposed on the surface of the polypeptide in an environment in which antigen recognition may occur in the process of initiation of an immune response.

[0223] Preferred polypeptide fragments of the invention are fragments comprising, or alternatively, consisting of, an amino acid sequence that displays a functional activity (e.g. biological activity such as, for example, activity useful in detecting, preventing, diagnosing, prognosticating, treating, and/or ameliorating allergic and/or asthmatic diseases and disorders; ability to multimerize; ability to bind a ligand; antigenic ability useful for production of polypeptide specific antibodies) of the polypeptide sequence of which the amino acid sequence is a fragment. By a polypeptide displaying a “functional activity” is meant a polypeptide capable of one or more known functional activities associated with a full-length protein, such as, for example, biological activity, antigenicity, immunogenicity, and/or multimerization, as described herein.

[0224] Other preferred polypeptide fragments are biologically active fragments. Biologically active fragments are those exhibiting activity similar, but not necessarily identical, to an activity of the polypeptide of the present invention. The biological activity of the fragments may include an improved desired activity, or a decreased undesirable activity.

[0225] In preferred embodiments, polypeptides of the invention comprise, or alternatively consist of, one, two, three, four, five or more of the antigenic fragments of the polypeptide of SEQ ID NO:Y, or portions thereof. Polynucleotides encoding these polypeptides are also encompassed by the invention.

Epitopes and Antibodies

[0226] The present invention encompasses polypeptides comprising, or alternatively consisting of, an epitope of: the polypeptide sequence shown in SEQ ID NO:Y; a polypeptide sequence encoded by SEQ ID NO:X or the complementary strand thereto; the polypeptide sequence encoded by the portion of SEQ ID NO:X as defined in columns 8 and 9 of Table 2; the polypeptide sequence encoded by the portion of SEQ ID NO:B as defined in column 6 of Table 1C or the complement thereto; the polypeptide sequence encoded by the cDNA contained in ATCC™ Deposit No:Z; or the polypeptide sequence encoded by a polynucleotide that hybridizes to the sequence of SEQ ID NO:X, the complement of the sequence of SEQ ID NO:X the complement of a portion of SEQ ID NO:X as defined in columns 8 and 9 of Table 2, or the cDNA sequence contained in ATCC™ Deposit No:Z under stringent hybridization conditions or alternatively, under lower stringency hybridization as defined supra. The present invention further encompasses polynucleotide sequences encoding an epitope of a polypeptide sequence of the invention (such as, for example, the sequence disclosed in SEQ ID NO:X, or a fragment thereof), polynucleotide sequences of the complementary strand of a polynucleotide sequence encoding an epitope of the invention, and polynucleotide sequences which hybridize to the complementary strand under stringent hybridization conditions or alternatively, under lower stringency hybridization conditions defined supra.

[0227] The term “epitopes,” as used herein, refers to portions of a polypeptide having antigenic or immunogenic activity in an animal, preferably a mammal, and most preferably in a human. In a preferred embodiment, the present invention encompasses a polypeptide comprising an epitope, as well as the polynucleotide encoding this polypeptide. An “immunogenic epitope,” as used herein, is defined as a portion of a protein that elicits an antibody response in an animal, as determined by any method known in the art, for example, by the methods for generating antibodies described infra. (See, for example, Geysen et al., Proc. Natl. Acad. Sci. USA 81:3998-4002 (1983)). The term “antigenic epitope,” as used herein, is defined as a portion of a protein to which an antibody can immunospecifically bind its antigen as determined by any method well known in the art, for example, by the immunoassays described herein. Immunospecific binding excludes non-specific binding but does not necessarily exclude cross-reactivity with other antigens. Antigenic epitopes need not necessarily be immunogenic.

[0228] Fragments which function as epitopes may be produced by any conventional means. (See, e.g., Houghten, R. A., Proc. Natl. Acad. Sci. USA 82:5131-5135 (1985) further described in U.S. Pat. No. 4,631,211.)

[0229] In the present invention, antigenic epitopes preferably contain a sequence of at least 4, at least 5, at least 6, at least 7, more preferably at least 8, at least 9, at least 10, at least 11, at least 12, at least 13, at least 14, at least 15, at least 20, at least 25, at least 30, at least 40, at least 50, and, most preferably, between about 15 to about 30 amino acids. Preferred polypeptides comprising immunogenic or antigenic epitopes are at least 10, 15, 20, 25, 30, 35, 40, 45, 50, 55, 60, 65, 70, 75, 80, 85, 90, 95, or 100 amino acid residues in length. Additional non-exclusive preferred antigenic epitopes include the antigenic epitopes disclosed herein, as well as portions thereof. Antigenic epitopes are useful, for example, to raise antibodies, including monoclonal antibodies, which specifically bind the epitope. Preferred antigenic epitopes include the antigenic epitopes disclosed herein, as well as any combination of two, three, four, five or more of these antigenic epitopes. Antigenic epitopes can be used as the target molecules in immunoassays. (See, for instance, Wilson et al., Cell 37:767-778 (1984); Sutcliffe et al., Science 219:660-666 (1983)).

[0230] Non-limiting examples of epitopes of polypeptides that can be used to generate antibodies of the invention include a polypeptide comprising, or alternatively consisting of, at least one, two, three, four, five, six or more of the portion(s) of SEQ ID NO:Y specified in Table 1B. These polypeptide fragments have been determined to bear antigenic epitopes of the proteins of the invention by the analysis of the Jameson-Wolf antigenic index, which is included in the DNAStar suite of computer programs. By “comprise” it is intended that a polypeptide contains at least one, two, three, four, five, six or more of the portion(s) of SEQ ID NO:Y shown in Table 1B, but it may contain additional flanking residues on either the amino or carboxyl termini of the recited portion. Such additional flanking sequences are preferably sequences naturally found adjacent to the portion; i.e., contiguous sequence shown in SEQ ID NO:Y. The flanking sequence may, however, be sequences from a heterolgous polypeptide, such as from another protein described herein or from a heterologous polypeptide not described herein. In particular embodiments, epitope portions of a polypeptide of the invention comprise one, two, three, or more of the portions of SEQ ID NO:Y shown in Table 1B.

[0231] Similarly, immunogenic epitopes can be used, for example, to induce antibodies according to methods well known in the art See, for instance, Sutcliffe et al., supra; Wilson et al., supra; Chow et al., Proc. Natl. Acad. Sci. USA 82:910-914; and Bittle et al., J. Gen. Virol. 66:2347-2354 (1985). Preferred immunogenic epitopes include the immunogenic epitopes disclosed herein, as well as any combination of two, three, four, five or more of these immunogenic epitopes. The polypeptides comprising one or more immunogenic epitopes may be presented for eliciting an antibody response together with a carrier protein, such as an albumin, to an animal system (such as rabbit or mouse), or, if the polypeptide is of sufficient length (at least about 25 amino acids), the polypeptide may be presented without a carrier. However, immunogenic epitopes comprising as few as 8 to 10 amino acids have been shown to be sufficient to raise antibodies capable of binding to, at the very least, linear epitopes in a denatured polypeptide (e.g., in Western blotting).

[0232] Epitope-bearing polypeptides of the present invention may be used to induce antibodies according to methods well known in the art including, but not limited to, in vivo immunization, in vitro immunization, and phage display methods. See, e.g., Sutcliffe et al., supra; Wilson et al., supra, and Bittle et al., J. Gen. Virol., 66:2347-2354 (1985). If in vivo immunization is used, animals may be immunized with free peptide; however, anti-peptide antibody titer may be boosted by coupling the peptide to a macromolecular carrier, such as keyhole limpet hemacyanin (KLH) or tetanus toxoid. For instance, peptides containing cysteine residues may be coupled to a carrier using a linker such as maleimidobenzoyl-N-hydroxysuccinimide ester (MBS), while other peptides may be coupled to carriers using a more general linking agent such as glutaraldehyde. Animals such as rabbits, rats and mice are immunized with either free or carrier-coupled peptides, for instance, by intraperitoneal and/or intradermal injection of emulsions containing about 100 μg of peptide or carrier protein and Freund's adjuvant or any other adjuvant known for stimulating an immune response. Several booster injections may be needed, for instance, at intervals of about two weeks, to provide a useful titer of anti-peptide antibody that can be detected, for example, by ELISA assay using free peptide adsorbed to a solid surface. The titer of anti-peptide antibodies in serum from an immunized animal may be increased by selection of anti-peptide antibodies, for instance, by adsorption to the peptide on a solid support and elution of the selected antibodies according to methods well known in the art.

[0233] As one of skill in the art will appreciate, and as discussed above, the polypeptides of the present invention (e.g., those comprising an immunogenic or antigenic epitope) can be fused to heterologous polypeptide sequences. For example, polypeptides of the present invention (including fragments or variants thereof), may be fused with the constant domain of immunoglobulins (IgA, IgE, IgG, IgM), or portions thereof (CH1, CH2, CH3, or any combination thereof and portions thereof, resulting in chimeric polypeptides. By way of another non-limiting example, polypeptides and/or antibodies of the present invention (including fragments or variants thereof) may be fused with albumin (including but not limited to recombinant human serum albumin or fragments or variants thereof (see, e.g., U.S. Pat. No. 5,876,969, issued Mar. 2, 1999, EP Patent 0 413 622, and U.S. Pat. No. 5,766,883, issued Jun. 16, 1998, herein incorporated by reference in their entirety)). In a preferred embodiment, polypeptides and/or antibodies of the present invention (including fragments or variants thereof) are fused with the mature form of human serum albumin (i.e., amino acids 1-585 of human serum albumin as shown in FIGS. 1 and 2 of EP Patent 0 322 094) which is herein incorporated by reference in its entirety. In another preferred embodiment, polypeptides and/or antibodies of the present invention (including fragments or variants thereof) are fused with polypeptide fragments comprising, or alternatively consisting of, amino acid residues 1−z of human serum albumin, where z is an integer from 369 to 419, as described in U.S. Pat. No. 5,766,883 herein incorporated by reference in its entirety. Polypeptides and/or antibodies of the present invention (including fragments or variants thereof) may be fused to either the N- or C-terminal end of the heterologous protein (e.g., immunoglobulin Fc polypeptide or human serum albumin polypeptide). Polynucleotides encoding fusion proteins of the invention are also encompassed by the invention.

[0234] Such fusion proteins as those described above may facilitate purification and may increase half-life in vivo. This has been shown for chimeric proteins consisting of the first two domains of the human CD4-polypeptide and various domains of the constant regions of the heavy or light chains of mammalian immunoglobulins. See, e.g., EP 394,827; Traunecker et al., Nature, 331:84-86 (1988). Enhanced delivery of an antigen across the epithelial barrier to the immune system has been demonstrated for antigens (e.g., insulin) conjugated to an FcRn binding partner such as IgG or Fe fragments (see, e.g., PCT Publications WO 96/22024 and WO 99/04813). IgG fusion proteins that have a disulfide-linked dimeric structure due to the IgG portion disulfide bonds have also been found to be more efficient in binding and neutralizing other molecules than monomeric polypeptides or fragments thereof alone. See, e.g., Fountoulakis et al., J. Biochem., 270:3958-3964 (1995). Nucleic acids encoding the above epitopes can also be recombined with a gene of interest as an epitope tag (e.g., the hemagglutinin (HA) tag or flag tag) to aid in detection and purification of the expressed polypeptide. For example, a system described by Janknecht et al. allows for the ready purification of non-denatured fusion proteins expressed in human cell lines (Janknecht et al., 1991, Proc. Natl. Acad. Sci. USA 88:8972-897). In this system, the gene of interest is subcloned into a vaccinia recombination plasmid such that the open reading frame of the gene is translationally fused to an amino-terminal tag consisting of six histidine residues. The tag serves as a matrix-binding domain for the fusion protein. Extracts from cells infected with the recombinant vaccinia virus are loaded onto Ni2+ nitriloacetic acid-agarose column and histidine-tagged proteins can be selectively eluted with imidazole-containing buffers.

Fusion Proteins

[0235] Any polypeptide of the present invention can be used to generate fusion proteins. For example, the polypeptide of the present invention, when fused to a second protein, can be used as an antigenic tag. Antibodies raised against the polypeptide of the present invention can be used to indirectly detect the second protein by binding to the polypeptide. Moreover, because secreted proteins target cellular locations based on trafficking signals, polypeptides of the present invention which are shown to be secreted can be used as targeting molecules once fused to other proteins.

[0236] Examples of domains that can be fused to polypeptides of the present invention include not only heterologous signal sequences, but also other heterologous functional regions. The fusion does not necessarily need to be direct, but may occur through linker sequences.

[0237] In certain preferred embodiments, proteins of the invention are fusion proteins comprising an amino acid sequence that is an N and/or C-terminal deletion of a polypeptide of the invention. In preferred embodiments, the invention is directed to a fusion protein comprising an amino acid sequence that is at least 90%, 95%, 96%, 97%, 98% or 99% identical to a polypeptide sequence of the invention. Polynucleotides encoding these proteins are also encompassed by the invention.

[0238] Moreover, fusion proteins may also be engineered to improve characteristics of the polypeptide of the present invention. For instance, a region of additional amino acids, particularly charged amino acids, may be added to the N-terminus of the polypeptide to improve stability and persistence during purification from the host cell or subsequent handling and storage. Also, peptide moieties may be added to the polypeptide to facilitate purification. Such regions may be removed prior to final preparation of the polypeptide. The addition of peptide moieties to facilitate handling of polypeptides is familiar and routine techniques in the art.

[0239] As one of skill in the art will appreciate that, as discussed above, polypeptides of the present invention, and epitope-bearing fragments thereof, can be combined with heterologous polypeptide sequences. For example, the polypeptides of the present invention may be fused with heterologous polypeptide sequences, for example, the polypeptides of the present invention may be fused with the constant domain of immunoglobulins (IgA, IgE, IgG, IgM) or portions thereof (CH1, CH2, CH3, and any combination thereof, including both entire domains and portions thereof), or albumin (including, but not limited to, native or recombinant human albumin or fragments or variants thereof (see, e.g., U.S. Pat. No. 5,876,969, issued Mar. 2, 1999, EP Patent 0 413 622, and U.S. Pat. No. 5,766,883, issued Jun. 16, 1998, herein incorporated by reference in their entirety)), resulting in chimeric polypeptides. For example, EP-A0 464 533 (Canadian counterpart 2045869) discloses fusion proteins comprising various portions of constant region of immunoglobulin molecules together with another human protein or part thereof. In many cases, the Fc part in a fusion protein is beneficial in therapy and diagnosis, and thus can result in, for example, improved pharmacokinetic properties (EP-A 0232 262). Alternatively, deleting the Fc part after the fusion protein has been expressed, detected, and purified, would be desired. For example, the Fe portion may hinder therapy and diagnosis if the fusion protein is used as an antigen for immunizations. In drug discovery, for example, human proteins, such as hIL-5, have been fused with Fe portions for the purpose of high-throughput screening assays to identify antagonists of hIL-5. See, D. Bennett et al., J. Molecular Recognition 8:52-58 (1995); K. Johanson et al., J. Biol. Chem. 270:9459-9471 (1995).

[0240] Moreover, the polypeptides of the present invention can be fused to marker sequences, such as a polypeptide that facilitates purification of the fused polypeptide. In preferred embodiments, the marker amino acid sequence is a hexa-histidine peptide, such as the tag provided in a pQE vector (QIAGEN, Inc., 9259 Eton Avenue, Chatsworth, Calif., 91311), among others, many of which are commercially available. As described in Gentz et al., Proc. Natl. Acad. Sci. USA 86:821-824 (1989), for instance, hexa-histidine provides for convenient purification of the fusion protein. Another peptide tag useful for purification, the “HA” tag, corresponds to an epitope derived from the influenza hemagglutinin protein (Wilson et al., Cell 37:767 (1984)).

[0241] Additional fusion proteins of the invention may be generated through the techniques of gene-shuffling, motif-shuffling, exon-shuffling, and/or codon-shuffling (collectively referred to as “DNA shuffling”). DNA shuffling may be employed to modulate the activities of polypeptides of the invention, such methods can be used to generate polypeptides with altered activity, as well as agonists and antagonists of the polypeptides. See, generally, U.S. Pat. Nos. 5,605,793; 5,811,238; 5,830,721; 5,834,252; and 5,837,458, and Patten et al., Curr. Opinion Biotechnol. 8:724-33 (1997); Harayama, Trends Biotechnol. 16(2):76-82 (1998); Hansson, et al., J. Mol. Biol. 287:265-76 (1999); and Lorenzo and Blasco, Biotechniques 24(2):308-13 (1998) (each of these patents and publications are hereby incorporated by reference in its entirety). In one embodiment, alteration of polynucleotides corresponding to SEQ ID NO:X and the polypeptides encoded by these polynucleotides may be achieved by DNA shuffling. DNA shuffling involves the assembly of two or more DNA segments by homologous or site-specific recombination to generate variation in the polynucleotide sequence. In another embodiment, polynucleotides of the invention, or the encoded polypeptides, may be altered by being subjected to random mutagenesis by error-prone PCR, random nucleotide insertion or other methods prior to recombination. In another embodiment, one or more components, motifs, sections, parts, domains, fragments, etc., of a polynucleotide encoding a polypeptide of the invention may be recombined with one or more components, motifs, sections, parts, domains, fragments, etc. of one or more heterologous molecules.

[0242] Thus, any of these above fusions can be engineered using the polynucleotides or the polypeptides of the present invention.

Recombinant and Synthetic Production of Polypeptides of the Invention

[0243] The present invention also relates to vectors containing the polynucleotide of the present invention, host cells, and the production of polypeptides by synthetic and recombinant techniques. The vector may be, for example, a phage, plasmid, viral, or retroviral vector. Retroviral vectors may be replication competent or replication defective. In the latter case, viral propagation generally will occur only in complementing host cells.

[0244] The polynucleotides of the invention may be joined to a vector containing a selectable marker for propagation in a host. Generally, a plasmid vector is introduced in a precipitate, such as a calcium phosphate precipitate, or in a complex with a charged lipid. If the vector is a virus, it may be packaged in vitro using an appropriate packaging cell line and then transduced into host cells.

[0245] The polynucleotide insert should be operatively linked to an appropriate promoter, such as the phage lambda PL promoter, the E. coli lac, tip, phoA and tac promoters, the SV40 early and late promoters and promoters of retroviral LTRs, to name a few. Other suitable promoters will be known to the skilled artisan. The expression constructs will further contain sites for transcription initiation, termination, and, in the transcribed region, a ribosome-binding site for translation. The coding portion of the transcripts expressed by the constructs will preferably include a translation initiating codon at the beginning and a termination codon (UAA, UGA or UAG) appropriately positioned at the end of the polypeptide to be translated.

[0246] As indicated, the expression vectors will preferably include at least one selectable marker. Such markers include dihydrofolate reductase, G418, glutamine synthase, or neomycin resistance for eukaryotic cell culture, and tetracycline, kanamycin or ampicillin resistance genes for culturing in E. coli and other bacteria. Representative examples of appropriate hosts include, but are not limited to, bacterial cells, such as E. coli, Streptomyces and Salmonella typhimurium cells; fungal cells, such as yeast cells (e.g., Saccharomyces cerevisiae or Pichia pastoris (ATCC™ Accession No. 201178)); insect cells such as Drosophila S2 and Spodoptera Sf9 cells; animal cells such as CHO, COS, 293, and Bowes melanoma cells; and plant cells. Appropriate culture mediums and conditions for the above-described host cells are known in the art

[0247] Among vectors preferred for use in bacteria include pQE70, pQE60 and pQE-9, available from QIAGEN, Inc.; pBLUESCRIPT™ vectors, Phagescript vectors, pNH8A, pNH16a, pNH18A, pNH46A, available from Stratagene Cloning Systems, Inc.; and ptrc99a, pKK223-3, pKK233-3, pDR540, pRIT5 available from PHARMACIA™ Biotech, Inc. Among preferred eukaryotic vectors are pWLNEO, pSV2CAT, pOG44, pXT1 and pSG available from STRATAGENE™; and pSVK3, pBPV, pMSG and pSVL available from PHARMACIA™. Preferred expression vectors for use in yeast systems include, but are not limited to pYES2, pYD1, pTEF1/Zeo, pYES2/GS, pPICZ, pGAPZ, pGAPZalph, pPIC9, pPIC3.5, pHIL-D2, pHIL-S1, pPIC3.5K, pPIC9K, and PAO815 (all available from Invitrogen, Carlbad, Calif.). Other suitable vectors will be readily apparent to the skilled artisan.

[0248] Vectors which use glutamine synthase (GS) or DHFR as the selectable markers can be amplified in the presence of the drugs methionine sulphoximine or methotrexate, respectively. An advantage of glutamine synthase based vectors is the availability of cell lines (e.g., the murine myeloma cell line, NS0) which are glutamine synthase negative. Glutamine synthase expression systems can also function in glutamine synthase expressing cells (e.g., Chinese Hamster Ovary (CHO) cells) by providing additional inhibitor to prevent the functioning of the endogenous gene. A glutamine synthase expression system and components thereof are detailed in PCT publications: WO87/04462; WO86/05807; WO89/01036; WO89/10404; and WO91/06657, which are hereby incorporated in their entireties by reference herein. Additionally, glutamine synthase expression vectors can be obtained from Lonza Biologics, Inc. (Portsmouth, N.H.). Expression and production of monoclonal antibodies using a GS expression system in murine myeloma cells is described in Bebbington et al., Bio/technology 10:169(1992) and in Biblia and Robinson Biotechnol. Prog. 11:1 (1995), which are herein incorporated by reference.

[0249] The present invention also relates to host cells containing the above-described vector constructs described herein, and additionally encompasses host cells containing nucleotide sequences of the invention that are operably associated with one or more heterologous control regions (e.g., promoter and/or enhancer) using techniques known of in the art. The host cell can be a higher eukaryotic cell, such as a mammalian cell (e.g., a human derived cell), or a lower eukaryotic cell, such as a yeast cell, or the host cell can be a prokaryotic cell, such as a bacterial cell. A host strain may be chosen which modulates the expression of the inserted gene sequences, or modifies and processes the gene product in the specific fashion desired. Expression from certain promoters can be elevated in the presence of certain inducers; thus expression of the genetically engineered polypeptide may be controlled. Furthermore, different host cells have characteristics and specific mechanisms for the translational and post-translational processing and modification (e.g., phosphorylation, cleavage) of proteins. Appropriate cell lines can be chosen to ensure the desired modifications and processing of the foreign protein expressed.

[0250] Introduction of the nucleic acids and nucleic acid constructs of the invention into the host cell can be effected by calcium phosphate transfection, DEAE-dextran mediated transfection, cationic lipid-mediated transfection, electroporation, transduction, infection, or other methods. Such methods are described in many standard laboratory manuals, such as Davis et al., Basic Methods In Molecular Biology (1986). It is specifically contemplated that the polypeptides of the present invention may in fact be expressed by a host cell lacking a recombinant vector.

[0251] In addition to encompassing host cells containing the vector constructs discussed herein, the invention also encompasses primary, secondary, and immortalized host cells of vertebrate origin, particularly mammalian origin, that have been engineered to delete or replace endogenous genetic material (e.g., the coding sequence), and/or to include genetic material (e.g., heterologous polynucleotide sequences) that is operably associated with polynucleotides of the invention, and which activates, alters, and/or amplifies endogenous polynucleotides. For example, techniques known in the art may be used to operably associate heterologous control regions (e.g., promoter and/or enhancer) and endogenous polynucleotide sequences via homologous recombination (see, e.g., U.S. Pat. No. 5,641,670, issued Jun. 24, 1997; International Publication Number WO 96/29411; International Publication Number WO 94/12650; Koller et al., Proc. Natl. Acad. Sci. USA 86:8932-8935 (1989); and Zijlstra et al., Nature 342:435-438 (1989), the disclosures of each of which are incorporated by reference in their entireties).

[0252] Polypeptides of the invention can be recovered and purified from recombinant cell cultures by well-known methods including ammonium sulfate or ethanol precipitation, acid extraction, anion or cation exchange chromatography, phosphocellulose chromatography, hydrophobic interaction chromatography, affinity chromatography, hydroxylapatite chromatography and lectin chromatography. Most preferably, high performance liquid chromatography (“HPLC”) is employed for purification.

[0253] Polypeptides of the present invention can also be recovered from: products purified from natural sources, including bodily fluids, tissues and cells, whether directly isolated or cultured; products of chemical synthetic procedures; and products produced by recombinant techniques from a prokaryotic or eukaryotic host, including, for example, bacterial, yeast, higher plant, insect, and mammalian cells. Depending upon the host employed in a recombinant production procedure, the polypeptides of the present invention may be glycosylated or may be non-glycosylated. In addition, polypeptides of the invention may also include an initial modified methionine residue, in some cases as a result of host-mediated processes. Thus, it is well known in the art that the N-terminal methionine encoded by the translation initiation codon generally is removed with high efficiency from any protein after translation in all eukaryotic cells. While the N-terminal methionine on most proteins also is efficiently removed in most prokaryotes, for some proteins, this prokaryotic removal process is inefficient, depending on the nature of the amino acid to which the N-terminal methionine is covalently linked.

[0254] In one embodiment, the yeast Pichia pastoris is used to express polypeptides of the invention in a eukaryotic system. Pichia pastoris is a methylotrophic yeast which can metabolize methanol as its sole carbon source. A main step in the methanol metabolization pathway is the oxidation of methanol to formaldehyde using O₂. This reaction is catalyzed by the enzyme alcohol oxidase. In order to metabolize methanol as its sole carbon source, Pichia pastoris must generate high levels of alcohol oxidase due, in part, to the relatively low affinity of alcohol oxidase for O₂. Consequently, in a growth medium depending on methanol as a main carbon source, the promoter region of one of the two alcohol oxidase genes (AOX1) is highly active. In the presence of methanol, alcohol oxidase produced from the AOX1 gene comprises up to approximately 30% of the total soluble protein in Pichia pastoris. See Ellis, S. B., et al., Mol. Cell. Biol. 5:1111-21 (1985); Koutz, P. J, et al., Yeast 5:167-77 (1989); Tschopp, J. F., et al., Nucl. Acids Res. 15:3859-76 (1987). Thus, a heterologous coding sequence, such as, for example, a polynucleotide of the present invention, under the transcriptional regulation of all or part of the AOX1 regulatory sequence is expressed at exceptionally high levels in Pichia yeast grown in the presence of methanol.

[0255] In one example, the plasmid vector pPIC9K is used to express DNA encoding a polypeptide of the invention, as set forth herein, in a Pichea yeast system essentially as described in “Pichia Protocols: Methods in Molecular Biology,” D. R. Higgins and J. Cregg, eds. The Humana Press, Totowa, N.J., 1998. This expression vector allows expression and secretion of a polypeptide of the invention by virtue of the strong AOX1 promoter linked to the Pichia pastoris alkaline phosphatase (PHO) secretory signal peptide (i.e., leader) located upstream of a multiple cloning site.

[0256] Many other yeast vectors could be used in place of pPIC9K, such as, pYES2, pYD1, pTEF1/Zeo, pYES2/GS, pPICZ, pGAPZ, pGAPZalpha, pPIC9, pPIC3.5, pHIL-D2, pHIL-S1, pPIC3.5K, and PAO815, as one skilled in the art would readily appreciate, as long as the proposed expression construct provides appropriately located signals for transcription, translation, secretion (if desired), and the like, including an in-frame AUG as required.

[0257] In another embodiment, high-level expression of a heterologous coding sequence, such as, for example, a polynucleotide of the present invention, may be achieved by cloning the heterologous polynucleotide of the invention into an expression vector such as, for example, pGAPZ or pGAPZalpha, and growing the yeast culture in the absence of methanol.

[0258] In addition to encompassing host cells containing the vector constructs discussed herein, the invention also encompasses primary, secondary, and immortalized host cells of vertebrate origin, particularly mammalian origin, that have been engineered to delete or replace endogenous genetic material (e.g., coding sequence), and/or to include genetic material (e.g., heterologous polynucleotide sequences) that is operably associated with polynucleotides of the invention, and which activates, alters, and/or amplifies endogenous polynucleotides. For example, techniques known in the art may be used to operably associate heterologous control regions (e.g., promoter and/or enhancer) and endogenous polynucleotide sequences via homologous recombination (see, e.g., U.S. Pat. No. 5,641,670, issued Jun. 24, 1997; International Publication No. WO 96/29411, published Sep. 26, 1996; International Publication No. WO 94/12650, published Aug. 4, 1994; Koller et al., Proc. Natl. Acad. Sci. USA 86:8932-8935 (1989); and Zijlstra et al., Nature 342:435-438 (1989), the disclosures of each of which are incorporated by reference in their entireties).

[0259] In addition, polypeptides of the invention can be chemically synthesized using techniques known in the art (e.g., see Creighton, 1983, Proteins: Structures and Molecular Principles, W.H. Freeman & Co., N.Y., and Hunkapiller et al., Nature, 310:105-111 (1984)). For example, a polypeptide corresponding to a fragment of a polypeptide can be synthesized by use of a peptide synthesizer. Furthermore, if desired, nonclassical amino acids or chemical amino acid analogs can be introduced as a substitution or addition into the polypeptide sequence. Non-classical amino acids include, but are not limited to, to the D-isomers of the common amino acids, 2,4-diaminobutyric acid, a-amino isobutyric acid, 4-aminobutyric acid, Abu, 2-amino butyric acid, g-Abu, e-Ahx, 6-amino hexanoic acid, Aib, 2-amino isobutyric acid, 3-amino propionic acid, ornithine, norleucine, norvaline, hydroxyproline, sarcosine, citrulline, homocitrulline, cysteic acid, t-butylglycine, t-butylalanine, phenylglycine, cyclohexylalanine, b-alanine, fluoro-amino acids, designer amino acids such as b-methyl amino acids, Ca-methyl amino acids, Na-methyl amino acids, and amino acid analogs in general. Furthermore, the amino acid can be D (dextrorotary) or L (levorotary).

[0260] The invention encompasses polypeptides of the present invention which are differentially modified during or after translation, e.g., by glycosylation, acetylation, phosphorylation, amidation, derivatization by known protecting/blocking groups, proteolytic cleavage, linkage to an antibody molecule or other cellular ligand, etc. Any of numerous chemical modifications may be carried out by known techniques, including but not limited, to specific chemical cleavage by cyanogen bromide, trypsin, chymotrypsin, papain, V8 protease, NaBH₄; acetylation, formylation, oxidation, reduction; metabolic synthesis in the presence of tunicamycin; etc.

[0261] Additional post-translational modifications encompassed by the invention include, for example, e.g., N-linked or O-linked carbohydrate chains, processing of N-terminal or C-terminal ends), attachment of chemical moieties to the amino acid backbone, chemical modifications of N-linked or O-linked carbohydrate chains, and addition or deletion of an N-terminal methionine residue as a result of procaryotic host cell expression. The polypeptides may also be modified with a detectable label, such as an enzymatic, fluorescent, isotopic or affinity label to allow for detection and isolation of the protein.

[0262] Examples of suitable enzymes include horseradish peroxidase, alkaline phosphatase, beta-galactosidase, or acetylcholinesterase; examples of suitable prosthetic group complexes include streptavidin/biotin and avidin/biotin; examples of suitable fluorescent materials include umbelliferone, fluorescein, fluorescein isothiocyanate, rhodamine, dichlorotriazinylamine fluorescein, dansyl chloride or phycoerythrin; an example of a luminescent material includes luminol; examples of bioluminescent materials include luciferase, luciferin, and aequorin; and examples of suitable radioactive material include iodine (¹²¹I, ¹²³I, ¹²⁵I, ¹³¹I), carbon (¹⁴C), sulfur (³⁵S), tritium (³H), indium (¹¹¹In, ¹¹²In, ^{113m}In, ^{115m}In), technetium (⁹⁹Tc, ^{99m}Tc), thallium (²⁰¹Ti), gallium (⁶⁸Ga, ⁶⁷Ga), palladium (¹⁰³Pd), molybdenum (⁹⁹Mo), xenon (¹³³Xe), fluorine (¹⁸F), ¹⁵³Sm, ¹⁷⁷Lu, ¹⁵⁹Gd, ¹⁴⁹Pm, ¹⁴⁰La, ¹⁷⁵Yb, ¹⁶⁶Ho, ⁹⁰Y, ⁴⁷Sc, ¹⁸⁶Re, ¹⁸⁸Re, ¹⁴²Pr, ¹⁰⁵Rh, and ⁹⁷Ru.

[0263] In specific embodiments, a polypeptide of the present invention or fragment or variant thereof is attached to macrocyclic chelators that associate with radiometal ions, including but not limited to, ¹⁷⁷Lu, ⁹⁰Y, ¹⁶⁶Ho, and ¹⁵³Sm, to polypeptides. In a preferred embodiment, the radiometal ion associated with the macrocyclic chelators is ¹¹¹In. In another preferred embodiment, the radiometal ion associated with the macrocyclic chelator is ⁹⁰Y. In specific embodiments, the macrocyclic chelator is 1,4,7,10-tetraazacyclododecane-N,N′,N″,N′″-tetraacetic acid (DOTA). In other specific embodiments, DOTA is attached to an antibody of the invention or fragment thereof via a linker molecule. Examples of linker molecules useful for conjugating DOTA to a polypeptide are commonly known in the art—see, for example, DeNardo et al., Clin Cancer Res. 4(10):2483-90 (1998); Peterson et al., Bioconjug. Chem. 10(4):553-7 (1999); and Zimmerman et al., Nucl. Med. Biol. 26(8):943-50 (1999); which are hereby incorporated by reference in their entirety.

[0264] As mentioned, the proteins of the invention may be modified by either natural processes, such as posttranslational processing, or by chemical modification techniques which are well known in the art. It will be appreciated that the same type of modification may be present in the same or varying degrees at several sites in a given polypeptide. Polypeptides of the invention may be branched, for example, as a result of ubiquitination, and they may be cyclic, with or without branching. Cyclic, branched, and branched cyclic polypeptides may result from posttranslation natural processes or may be made by synthetic methods. Modifications include acetylation, acylation, ADP-ribosylation, amidation, covalent attachment of flavin, covalent attachment of a heme moiety, covalent attachment of a nucleotide or nucleotide derivative, covalent attachment of a lipid or lipid derivative, covalent attachment of phosphotidylinositol, cross-linking, cyclization, disulfide bond formation, demethylation, formation of covalent cross-links, formation of cysteine, formation of pyroglutamate, formylation, gamma-carboxylation, glycosylation, GPI anchor formation, hydroxylation, iodination, methylation, myristoylation, oxidation, pegylation, proteolytic processing, phosphorylation, prenylation, racemization, selenoylation, sulfation, transfer-RNA mediated addition of amino acids to proteins such as arginylation, and ubiquitination. (See, for instance, PROTEINS—STRUCTURE AND MOLECULAR PROPERTIES, 2nd Ed., T. E. Creighton, W. H. Freeman and Company, New York (1993); POSTTRANSLATIONAL COVALENT MODIFICATION OF PROTEINS, B. C. Johnson, Ed., Academic Press, New York, pgs. 1-12 (1983); Seifter et al., Meth. Enzymol. 182:626-646 (1990); Rattan et al., Ann. N.Y. Acad. Sci. 663:48-62 (1992)).

[0265] Also provided by the invention are chemically modified derivatives of the polypeptides of the invention which may provide additional advantages such as increased solubility, stability and circulating time of the polypeptide, or decreased immunogenicity (see U.S. Pat. No. 4,179,337). The chemical moieties for derivitization may be selected from water soluble polymers such as polyethylene glycol, ethylene glycol/propylene glycol copolymers, carboxymethylcellulose, dextran, polyvinyl alcohol and the like. The polypeptides may be modified at random positions within the molecule, or at predetermined positions within the molecule and may include one, two, three or more attached chemical moieties.

[0266] The polymer may be of any molecular weight, and may be branched or unbranched. For polyethylene glycol, the preferred molecular weight is between about 1 kDa and about 100 kDa (the term “about” indicating that in preparations of polyethylene glycol, some molecules will weigh more, some less, than the stated molecular weight) for ease in handling and manufacturing. Other sizes may be used, depending on the desired therapeutic profile (e.g., the duration of sustained release desired, the effects, if any on biological activity, the ease in handling, the degree or lack of antigenicity and other known effects of the polyethylene glycol to a therapeutic protein or analog). For example, the polyethylene glycol may have an average molecular weight of about 200, 500, 1000, 1500, 2000, 2500, 3000, 3500, 4000, 4500, 5000, 5500, 6000, 6500, 7000, 7500, 8000, 8500, 9000, 9500, 10,000, 10,500, 11,000, 11,500, 12,000, 12,500, 13,000, 13,500, 14,000, 14,500, 15,000, 15,500, 16,000, 16,500, 17,000, 17,500, 18,000, 18,500, 19,000, 19,500, 20,000, 25,000, 30,000, 35,000, 40,000, 45,000, 50,000, 55,000, 60,000, 65,000, 70,000, 75,000, 80,000, 85,000, 90,000, 95,000, or 100,000 kDa

[0267] As noted above, the polyethylene glycol may have a branched structure. Branched polyethylene glycols are described, for example, in U.S. Pat. No. 5,643,575; Morpurgo et al., Appl. Biochem. Biotechnol. 56:59-72 (1996); Vorobjev et al., Nucleosides Nucleotides 18:2745-2750 (1999); and Caliceti et al., Bioconjug. Chem. 10:638-646 (1999), the disclosures of each of which are incorporated herein by reference.

[0268] The polyethylene glycol molecules (or other chemical moieties) should be attached to the protein with consideration of effects on functional or antigenic domains of the protein. There are a number of attachment methods available to those skilled in the art, such as, for example, the method disclosed in EP 0 401 384 (coupling PEG to G-CSF), herein incorporated by reference; see also Malik et al., Exp. Hematol. 20:1028-1035 (1992), reporting pegylation of GM-CSF using tresyl chloride. For example, polyethylene glycol may be covalently bound through amino acid residues via a reactive group, such as a free amino or carboxyl group. Reactive groups are those to which an activated polyethylene glycol molecule may be bound. The amino acid residues having a free amino group may include lysine residues and the N-terminal amino acid residues; those having a free carboxyl group may include aspartic acid residues glutamic acid residues and the C-terminal amino acid residue. Sulfhydryl groups may also be used as a reactive group for attaching the polyethylene glycol molecules. Preferred for therapeutic purposes is attachment at an amino group, such as attachment at the N-terminus or lysine group.

[0269] As suggested above, polyethylene glycol may be attached to proteins via linkage to any of a number of amino acid residues. For example, polyethylene glycol can be linked to proteins via covalent bonds to lysine, histidine, aspartic acid, glutamic acid, or cysteine residues. One or more reaction chemistries may be employed to attach polyethylene glycol to specific amino acid residues (e.g., lysine, histidine, aspartic acid, glutamic acid, or cysteine) of the protein or to more than one type of amino acid residue (e.g., lysine, histidine, aspartic acid, glutamic acid, cysteine and combinations thereof) of the protein.

[0270] One may specifically desire proteins chemically modified at the N-terminus. Using polyethylene glycol as an illustration of the present composition, one may select from a variety of polyethylene glycol molecules (by molecular weight, branching, etc.), the proportion of polyethylene glycol molecules to protein (polypeptide) molecules in the reaction mix, the type of pegylation reaction to be performed, and the method of obtaining the selected N-terminally pegylated protein. The method of obtaining the N-terminally pegylated preparation (i.e., separating this moiety from other monopegylated moieties if necessary) may be by purification of the N-terminally pegylated material from a population of pegylated protein molecules. Selective proteins chemically modified at the N-terminus modification may be accomplished by reductive alkylation, which exploits differential reactivity of different types of primary amino groups (lysine versus the N-terminal) available for derivatization in a particular protein. Under the appropriate reaction conditions, substantially selective derivatization of the protein at the N-terminus with a carbonyl group containing polymer is achieved.

[0271] As indicated above, pegylation of the proteins of the invention may be accomplished by any number of means. For example, polyethylene glycol may be attached to the protein either directly or by an intervening linker. Linkerless systems for attaching polyethylene glycol to proteins are described in Delgado et al., Crit. Rev. Thera Drug Carrier Sys. 9:249-304 (1992); Francis et al., Intern. J. of Hematol. 68:1-18 (1998); U.S. Pat. No. 4,002,531; U.S. Pat. No. 5,349,052; WO 95/06058; and WO 98/32466, the disclosures of each of which are incorporated herein by reference.

[0272] One system for attaching polyethylene glycol directly to amino acid residues of proteins without an intervening linker employs tresylated MPEG, which is produced by the modification of monmethoxy polyethylene glycol (MPEG) using tresylchloride (ClSO₂CH₂CF₃). Upon reaction of protein with tresylated MPEG, polyethylene glycol is directly attached to amine groups of the protein. Thus, the invention includes protein-polyethylene glycol conjugates produced by reacting proteins of the invention with a polyethylene glycol molecule having a 2,2,2-trifluoreothane sulphonyl group.

[0273] Polyethylene glycol can also be attached to proteins using a number of different intervening linkers. For example, U.S. Pat. No. 5,612,460, the entire disclosure of which is incorporated herein by reference, discloses urethane linkers for connecting polyethylene glycol to proteins. Protein-polyethylene glycol conjugates wherein the polyethylene glycol is attached to the protein by a linker can also be produced by reaction of proteins with compounds such as MPEG-succinimidylsuccinate, MPEG activated with 1,1′-carbonyldiimidazole, MPEG-2,4,5-trichloropenylcarbonate, MPEG-p-nitrophenolcarbonate, and various MPEG-succinate derivatives. A number of additional polyethylene glycol derivatives and reaction chemistries for attaching polyethylene glycol to proteins are described in International Publication No. WO 98/32466, the entire disclosure of which is incorporated herein by reference. Pegylated protein products produced using the reaction chemistries set out herein are included within the scope of the invention.

[0274] The number of polyethylene glycol moieties attached to each protein of the invention (i.e., the degree of substitution) may also vary. For example, the pegylated proteins of the invention may be linked, on average, to 1, 2, 3, 4, 5, 6, 7, 8, 9, 10, 12, 15, 17, 20, or more polyethylene glycol molecules. Similarly, the average degree of substitution within ranges such as 1-3, 2-4, 3-5, 4-6, 5-7, 6-8, 7-9, 8-10, 9-11, 10-12, 11-13, 12-14, 13-15, 14-16, 15-17, 16-18, 17-19, or 18-20 polyethylene glycol moieties per protein molecule. Methods for determining the degree of substitution are discussed, for example, in Delgado et al., Crit. Rev. Thera Drug Carrier Sys. 9:249-304 (1992).

[0275] The polypeptides of the invention can be recovered and purified from chemical synthesis and recombinant cell cultures by standard methods which include, but are not limited to, ammonium sulfate or ethanol precipitation, acid extraction, anion or cation exchange chromatography, phosphocellulose chromatography, hydrophobic interaction chromatography, affinity chromatography, hydroxylapatite chromatography and lectin chromatography. Most preferably, high performance liquid chromatography (“HPLC”) is employed for purification. Well-known techniques for refolding protein may be employed to regenerate active conformation when the polypeptide is denatured during isolation and/or purification.

[0276] The polypeptides of the invention may be in monomers or multimers (i.e., dimers, trimers, tetramers and higher multimers). Accordingly, the present invention relates to monomers and multimers of the polypeptides of the invention, their preparation, and compositions (preferably, Therapeutics) containing them. In specific embodiments, the polypeptides of the invention are monomers, dimers, trimers or tetramers. In additional embodiments, the multimers of the invention are at least dimers, at least trimers, or at least tetramers.

[0277] Multimers encompassed by the invention may be homomers or heteromers. As used herein, the term homomer refers to a multimer containing only polypeptides corresponding to a protein of the invention (e.g., the amino acid sequence of SEQ ID NO:Y, an amino acid sequence encoded by SEQ ID NO:X or the complement of SEQ ID NO:X, the amino acid sequence encoded by the portion of SEQ ID NO:X as defined in columns 8 and 9 of Table 2, and/or an amino acid sequence encoded by cDNA contained in ATCC™ Deposit No:Z (including fragments, variants, splice variants, and fusion proteins, corresponding to these as described herein)). These homomers may contain polypeptides having identical or different amino acid sequences. In a specific embodiment, a homomer of the invention is a multimer containing only polypeptides having an identical amino acid sequence. In another specific embodiment, a homomer of the invention is a multimer containing polypeptides having different amino acid sequences. In specific embodiments, the multimer of the invention is a homodimer (e.g., containing two polypeptides having identical or different amino acid sequences) or a homotrimer (e.g., containing three polypeptides having identical and/or different amino acid sequences). In additional embodiments, the homomeric multimer of the invention is at least a homodimer, at least a homotrimer, or at least a homotetramer.

[0278] As used herein, the term heteromer refers to a multimer containing one or more heterologous polypeptides (i.e., polypeptides of different proteins) in addition to the polypeptides of the invention. In a specific embodiment, the multimer of the invention is a heterodimer, a heterotrimer, or a heterotetramer. In additional embodiments, the heteromeric multimer of the invention is at least a heterodimer, at least a heterotrimer, or at least a heterotetramer.

[0279] Multimers of the invention may be the result of hydrophobic, hydrophilic, ionic and/or covalent associations and/or may be indirectly linked by, for example, liposome formation. Thus, in one embodiment, multimers of the invention, such as, for example, homodimers or homotrimers, are formed when polypeptides of the invention contact one another in solution. In another embodiment, heteromultimers of the invention, such as, for example, heterotrimers or heterotetramers, are formed when polypeptides of the invention contact antibodies to the polypeptides of the invention (including antibodies to the heterologous polypeptide sequence in a fusion protein of the invention) in solution. In other embodiments, multimers of the invention are formed by covalent associations with and/or between the polypeptides of the invention. Such covalent associations may involve one or more amino acid residues contained in the polypeptide sequence (e.g., that recited in SEQ ID NO:Y, encoded by the portion of SEQ ID NO:X as defined in columns 8 and 9 of Table 2, and/or encoded by the cDNA contained in ATCC™ Deposit No:Z). In one instance, the covalent associations are cross-linking between cysteine residues located within the polypeptide sequences that interact in the native (i.e., naturally occurring) polypeptide. In another instance, the covalent associations are the consequence of chemical or recombinant manipulation. Alternatively, such covalent associations may involve one or more amino acid residues contained in the heterologous polypeptide sequence in a fusion protein. In one example, covalent associations are between the heterologous sequence contained in a fusion protein of the invention (see, e.g., U.S. Pat. No. 5,478,925). In a specific example, the covalent associations are between the heterologous sequence contained in a Fe fusion protein of the invention (as described herein). In another specific example, covalent associations of fusion proteins of the invention are between heterologous polypeptide sequence from another protein that is capable of forming covalently associated multimers, such as for example, osteoprotegerin (see, e.g., International Publication NO: WO 98/49305, the contents of which are herein incorporated by reference in its entirety). In another embodiment, two or more polypeptides of the invention are joined through peptide linkers. Examples include those peptide linkers described in U.S. Pat. No. 5,073,627 (hereby incorporated by reference). Proteins comprising multiple polypeptides of the invention separated by peptide linkers may be produced using conventional recombinant DNA technology.

[0280] Another method for preparing multimer polypeptides of the invention involves use of polypeptides of the invention fused to a leucine zipper or isoleucine zipper polypeptide sequence. Leucine zipper and isoleucine zipper domains are polypeptides that promote multimerization of the proteins in which they are found. Leucine zippers were originally identified in several DNA-binding proteins (Landschulz et al., Science 240:1759, (1988)), and have since been found in a variety of different proteins. Among the known leucine zippers are naturally occurring peptides and derivatives thereof that dimerize or trimerize. Examples of leucine zipper domains suitable for producing soluble multimeric proteins of the invention are those described in PCT application WO 94/10308, hereby incorporated by reference. Recombinant fusion proteins comprising a polypeptide of the invention fused to a polypeptide sequence that dimerizes or trimerizes in solution are expressed in suitable host cells, and the resulting soluble multimeric fusion protein is recovered from the culture supernatant using techniques known in the art.

[0281] Trimeric polypeptides of the invention may offer the advantage of enhanced biological activity. Preferred leucine zipper moieties and isoleucine moieties are those that preferentially form trimers. One example is a leucine zipper derived from lung surfactant protein D (SPD), as described in Hoppe et al. (FEBS Letters 344:191, (1994)) and in U.S. patent application Ser. No. 08/446,922, hereby incorporated by reference. Other peptides derived from naturally occurring trimeric proteins may be employed in preparing trimeric polypeptides of the invention.

[0282] In another example, proteins of the invention are associated by interactions between Flag® polypeptide sequence contained in fusion proteins of the invention containing Flag® polypeptide sequence. In a further embodiment, proteins of the invention are associated by interactions between heterologous polypeptide sequence contained in Flag® fusion proteins of the invention and anti-Flag® antibody.

[0283] The multimers of the invention may be generated using chemical techniques known in the art. For example, polypeptides desired to be contained in the multimers of the invention may be chemically cross-linked using linker molecules and linker molecule length optimization techniques known in the art (see, e.g., U.S. Pat. No. 5,478,925, which is herein incorporated by reference in its entirety). Additionally, multimers of the invention may be generated using techniques known in the art to form one or more inter-molecule cross-links between the cysteine residues located within the sequence of the polypeptides desired to be contained in the multimer (see, e.g., U.S. Pat. No. 5,478,925, which is herein incorporated by reference in its entirety). Further, polypeptides of the invention may be routinely modified by the addition of cysteine or biotin to the C-terminus or N-terminus of the polypeptide and techniques known in the art may be applied to generate multimers containing one or more of these modified polypeptides (see, e.g., U.S. Pat. No. 5,478,925, which is herein incorporated by reference in its entirety). Additionally, techniques known in the art may be applied to generate liposomes containing the polypeptide components desired to be contained in the multimer of the invention (see, e.g., U.S. Pat. No. 5,478,925, which is herein incorporated by reference in its entirety).

[0284] Alternatively, multimers of the invention may be generated using genetic engineering techniques known in the art. In one embodiment, polypeptides contained in multimers of the invention are produced recombinantly using fusion protein technology described herein or otherwise known in the art (see, e.g., U.S. Pat. No. 5,478,925, which is herein incorporated by reference in its entirety). In a specific embodiment, polynucleotides coding for a homodimer of the invention are generated by ligating a polynucleotide sequence encoding a polypeptide of the invention to a sequence encoding a linker polypeptide and then further to a synthetic polynucleotide encoding the translated product of the polypeptide in the reverse orientation from the original C-terminus to the N-terminus (lacking the leader sequence) (see, e.g., U.S. Pat. No. 5,478,925, which is herein incorporated by reference in its entirety). In another embodiment, recombinant techniques described herein or otherwise known in the art are applied to generate recombinant polypeptides of the invention which contain a transmembrane domain (or hydrophobic or signal peptide) and which can be incorporated by membrane reconstitution techniques into liposomes (see, e.g., U.S. Pat. No. 5,478,925, which is herein incorporated by reference in its entirety).

Antibodies

[0285] Further polypeptides of the invention relate to antibodies and T-cell antigen receptors (TCR) which immunospecifically bind a polypeptide, polypeptide fragment, or variant of the invention (e.g., a polypeptide or fragment or variant of the amino acid sequence of SEQ ID NO:Y or a polypeptide encoded by the cDNA contained in ATCC™ Deposit No:Z, and/or an epitope, of the present invention) as determined by immunoassays well known in the art for assaying specific antibody-antigen binding. Antibodies of the invention include, but are not limited to, polyclonal, monoclonal, multispecific, human, humanized or chimeric antibodies, single chain antibodies, Fab fragments, F(ab′) fragments, fragments produced by a Fab expression library, anti-idiotypic (anti-Id) antibodies (including, e.g., anti-Id antibodies to antibodies of the invention), intracellularly-made antibodies (i.e., intrabodies), and epitope-binding fragments of any of the above. The term “antibody,” as used herein, refers to immunoglobulin molecules and immunologically active portions of immunoglobulin molecules, i.e., molecules that contain an antigen binding site that immunospecifically binds an antigen. The immunoglobulin molecules of the invention can be of any type (e.g., IgG, IgE, IgM, IgD, IgA and IgY), class (e.g., IgG1, IgG2, IgG3, IgG4, IgA1 and IgA2) or subclass of immunoglobulin molecule. In preferred embodiments, the immunoglobulin molecules of the invention are IgG1. In other preferred embodiments, the immunoglobulin molecules of the invention are IgG4.

[0286] Most preferably the antibodies are human antigen-binding antibody fragments of the present invention and include, but are not limited to, Fab, Fab′ and F(ab′)₂, Fd, single-chain Fvs (scFv), single-chain antibodies, disulfide-linked Fvs (sdFv) and fragments comprising either a VL or VH domain. Antigen-binding antibody fragments, including single-chain antibodies, may comprise the variable region(s) alone or in combination with the entirety or a portion of the following: hinge region, CH1, CH2, and CH3 domains. Also included in the invention are antigen-binding fragments also comprising any combination of variable region(s) with a hinge region, CH1, CH2, and CH3 domains. The antibodies of the invention may be from any animal origin including birds and mammals. Preferably, the antibodies are human, murine (e.g., mouse and rat), donkey, ship rabbit, goat, guinea pig, camel, horse, or chicken. As used herein, “human” antibodies include antibodies having the amino acid sequence of a human immunoglobulin and include antibodies isolated from human immunoglobulin libraries or from animals transgenic for one or more human immunoglobulin and that do not express endogenous immunoglobulins, as described infra and, for example in, U.S. Pat. No. 5,939,598 by Kucherlapati et al.

[0287] The antibodies of the present invention may be monospecific, bispecific, trispecific or of greater multispecificity. Multispecific antibodies may be specific for different epitopes of a polypeptide of the present invention or may be specific for both a polypeptide of the present invention as well as for a heterologous epitope, such as a heterologous polypeptide or solid support material. See, e.g., PCT publications WO 93/17715; WO 92/08802; WO 91/00360; WO 92/05793; Tutt, et al., J. Immunol. 147:60-69 (1991); U.S. Pat. Nos. 4,474,893; 4,714,681; 4,925,648; 5,573,920; 5,601,819; Kostelny et al., J. Immunol. 148:1547-1553 (1992).

[0288] Antibodies of the present invention may be described or specified in terms of the epitope(s) or portion(s) of a polypeptide of the present invention that they recognize or specifically bind. The epitope(s) or polypeptide portion(s) may be specified as described herein, e.g., by N-terminal and C-terminal positions, or by size in contiguous amino acid residues, or listed in the Tables and Figures. Preferred epitopes of the invention include the predicted epitopes shown in Table 1B, as well as polynucleotides that encode these epitopes. Antibodies that specifically bind any epitope or polypeptide of the present invention may also be excluded. Therefore, the present invention includes antibodies that specifically bind polypeptides of the present invention, and allows for the exclusion of the same.

[0289] Antibodies of the present invention may also be described or specified in terms of their cross-reactivity. Antibodies that do not bind any other analog, ortholog, or homolog of a polypeptide of the present invention are included. Antibodies that bind polypeptides with at least 95%, at least 90%, at least 85%, at least 80%, at least 75%, at least 70%, at least 65%, at least 60%, at least 55%, and at least 50% identity (as calculated using methods known in the art and described herein) to a polypeptide of the present invention are also included in the present invention. In specific embodiments, antibodies of the present invention cross-react with murine, rat and/or rabbit homologs of human proteins and the corresponding epitopes thereof. Antibodies that do not bind polypeptides with less than 95%, less than 90%, less than 85%, less than 80%, less than 75%, less than 70%, less than 65%, less than 60%, less than 5%, and less than 50% identity (as calculated using methods known in the art and described herein) to a polypeptide of the present invention are also included in the present invention. In a specific embodiment, the above-described cross-reactivity is with respect to any single specific antigenic or immunogenic polypeptide, or combination(s) of 2, 3, 4, 5, or more of the specific antigenic and/or immunogenic polypeptides disclosed herein. Further included in the present invention are antibodies that bind polypeptides encoded by polynucleotides that hybridize to a polynucleotide of the present invention under stringent hybridization conditions (as described herein). Antibodies of the present invention may also be described or specified in terms of their binding affinity to a polypeptide of the invention. Preferred binding affinities include those with a dissociation constant or Kd less than 5×10⁻² M, 10⁻² M, 5×10⁻³ M, 10⁻³ M, 5×10⁻⁴ M, 10⁻⁴ M, 5×10⁻⁵ M, 10⁻⁵ M, 5×10⁻⁶ M, 10⁻⁶ M, 5×10⁻⁷ M, 10⁻⁷ M, 5×10⁻⁸ M, 10⁻⁸ M, 5×10⁻⁹ M, 10⁻⁹ M, 5×10⁻¹⁰ M, 10⁻¹⁰ M, 5×10⁻¹¹ M, 10⁻¹¹ M, 5×10⁻¹² M, 10⁻¹² M, 5×10⁻¹³ M, 10⁻¹³ M, 5×10⁻¹⁴ M, 10⁻¹⁴ M, 5×10⁻¹⁵ M, or 10⁻¹⁵M.

[0290] The invention also provides antibodies that competitively inhibit binding of an antibody to an epitope of the invention as determined by any method known in the art for determining competitive binding, for example, the immunoassays described herein. In preferred embodiments, the antibody competitively inhibits binding to the epitope by at least 95%, at least 90%, at least 85%, at least 80%, at least 75%, at least 70%, at least 60%, or at least 50%.

[0291] Antibodies of the present invention may act as agonists or antagonists of the polypeptides of the present invention. For example, the present invention includes antibodies that disrupt the receptor/ligand interactions with the polypeptides of the invention either partially or fully. Preferably, antibodies of the present invention bind an antigenic epitope disclosed herein, or a portion thereof. The invention features both receptor-specific antibodies and ligand-specific antibodies. The invention also features receptor-specific antibodies that do not prevent ligand binding but prevent receptor activation. Receptor activation (i.e., signaling) may be determined by techniques described herein or otherwise known in the art. For example, receptor activation can be determined by detecting the phosphorylation (e.g., tyrosine or serine/threonine) of the receptor or its substrate by immunoprecipitation followed by western blot analysis (for example, as described supra). In specific embodiments, antibodies are provided that inhibit ligand activity or receptor activity by at least 95%, at least 90%, at least 85%, at least 80%, at least 75%, at least 70%, at least 60%, or at least 50% of the activity in absence of the antibody.

[0292] The invention also features receptor-specific antibodies which both prevent ligand binding and receptor activation as well as antibodies that recognize the receptor-ligand complex, and, preferably, do not specifically recognize the unbound receptor or the unbound ligand. Likewise, included in the invention are neutralizing antibodies that bind the ligand and prevent binding of the ligand to the receptor, as well as antibodies that bind the ligand, thereby preventing receptor activation, but do not prevent the ligand from binding the receptor. Further included in the invention are antibodies that activate the receptor. These antibodies may act as receptor agonists, i.e., potentiate or activate either all or a subset of the biological activities of the ligand-mediated receptor activation, for example, by inducing dimerization of the receptor. The antibodies may be specified as agonists, antagonists or inverse agonists for biological activities comprising the specific biological activities of the peptides of the invention disclosed herein. The above antibody agonists can be made using methods known in the art. See, e.g., PCT publication WO 96/40281; U.S. Pat. No. 5,811,097; Deng et al., Blood 92(6):1981-1988 (1998); Chen et al., Cancer Res. 58(16):3668-3678 (1998); Harrop et al., J. Immunol. 161(4):1786-1794 (1998); Zhu et al., Cancer Res. 58(15):3209-3214 (1998); Yoon et al., J. Immunol. 160(7):3170-3179 (1998); Prat et al., J. Cell. Sci. 111(Pt2):237-247 (1998); Pitard et al., J. Immunol. Methods 205(2):177-190 (1997); Liautard et al., Cytokine 9(4):233-241 (1997); Carlson et al., J. Biol. Chem. 272(17):11295-11301 (1997); Taryman et al., Neuron 14(4):755-762 (1995); Muller et al., Structure 6(9):1153-1167 (1998); Bartunek et al., Cytokine 8(1):14-20 (1996) (which are all incorporated by reference herein in their entireties).

[0293] Antibodies of the present invention may be used, for example, to purify, detect, and target the polypeptides of the present invention, including both in vitro and in vivo diagnostic and therapeutic methods. For example, the antibodies have utility in immunoassays for qualitatively and quantitatively measuring levels of the polypeptides of the present invention in biological samples. See, e.g., Harlow et al., Antibodies: A Laboratory Manual, (Cold Spring Harbor Laboratory Press, 2nd ed. 1988); incorporated by reference herein in its entirety.

[0294] As discussed in more detail below, the antibodies of the present invention may be used either alone or in combination with other compositions. The antibodies may further be recombinantly fused to a heterologous polypeptide at the N- or C-terminus or chemically conjugated (including covalent and non-covalent conjugations) to polypeptides or other compositions. For example, antibodies of the present invention may be recombinantly fused or conjugated to molecules useful as labels in detection assays and effector molecules such as heterologous polypeptides, drugs, radionuclides, or toxins. See, e.g., PCT publications WO 92/08495; WO 91/14438; WO 89/12624; U.S. Pat. No. 5,314,995; and EP 396,387; the disclosures of which are incorporated herein by reference in their entireties.

[0295] The antibodies of the invention include derivatives that are modified, i.e, by the covalent attachment of any type of molecule to the antibody such that covalent attachment does not prevent the antibody from generating an anti-idiotypic response. For example, but not by way of limitation, the antibody derivatives include antibodies that have been modified, e.g., by glycosylation, acetylation, pegylation, phosphylation, amidation, derivatization by known protecting/blocking groups, proteolytic cleavage, linkage to a cellular ligand or other protein, etc. Any of numerous chemical modifications may be carried out by known techniques, including, but not limited to specific chemical cleavage, acetylation, formylation, metabolic synthesis of tunicamycin, etc. Additionally, the derivative may contain one or more non-classical amino acids.

[0296] The antibodies of the present invention may be generated by any suitable method known in the art. Polyclonal antibodies to an antigen-of-interest can be produced by various procedures well known in the art. For example, a polypeptide of the invention can be administered to various host animals including, but not limited to, rabbits, mice, rats, etc. to induce the production of sera containing polyclonal antibodies specific for the antigen. Various adjuvants may be used to increase the immunological response, depending on the host species, and include but are not limited to, Freund's (complete and incomplete), mineral gels such as aluminum hydroxide, surface active substances such as lysolecithin, pluronic polyols, polyanions, peptides, oil emulsions, keyhole limpet hemocyanins, dinitrophenol, and potentially useful human adjuvants such as BCG (bacille Calmette-Guerin) and corynebacterium parvum. Such adjuvants are also well known in the art.

[0297] Monoclonal antibodies can be prepared using a wide variety of techniques known in the art including the use of hybridoma, recombinant, and phage display technologies, or a combination thereof. For example, monoclonal antibodies can be produced using hybridoma techniques including those known in the art and taught, for example, in Harlow et al., Antibodies: A Laboratory Manual, (Cold Spring Harbor Laboratory Press, 2nd ed. 1988); Hammerling, et al., in: Monoclonal Antibodies and T-Cell Hybridomas 563-681 (Elsevier, N.Y., 1981) (said references incorporated by reference in their entireties). The term “monoclonal antibody” as used herein is not limited to antibodies produced through hybridoma technology. The term “monoclonal antibody” refers to an antibody that is derived from a single clone, including any eukaryotic, prokaryotic, or phage clone, and not the method by which it is produced.

[0298] Methods for producing and screening for specific antibodies using hybridoma technology are routine and well known in the art and are discussed in detail in the Examples. In a non-limiting example, mice can be immunized with a polypeptide of the invention or a cell expressing such peptide. Once an immune response is detected, e.g., antibodies specific for the antigen are detected in the mouse serum, the mouse spleen is harvested and splenocytes isolated. The splenocytes are then fused by well-known techniques to any suitable myeloma cells, for example cells from cell line SP20 available from the ATCC™. Hybridomas are selected and cloned by limited dilution. The hybridoma clones are then assayed by methods known in the art for cells that secrete antibodies capable of binding a polypeptide of the invention. Ascites fluid, which generally contains high levels of antibodies, can be generated by immunizing mice with positive hybridoma clones.

[0299] Accordingly, the present invention provides methods of generating monoclonal antibodies as well as antibodies produced by the method comprising culturing a hybridoma cell secreting an antibody of the invention wherein, preferably, the hybridoma is generated by fusing splenocytes isolated from a mouse immunized with an antigen of the invention with myeloma cells and then screening the hybridomas resulting from the fusion for hybridoma clones that secrete an antibody able to bind a polypeptide of the invention.

[0300] Another well-known method for producing both polyclonal and monoclonal human B cell lines is transformation using Epstein Barr Virus (EBV). Protocols for generating EBV-transformed B cell lines are commonly known in the art, such as, for example, the protocol outlined in Chapter 7.22 of Current Protocols in Immunology, Coligan et al., Eds., 1994, John Wiley & Sons, NY, which is hereby incorporated in its entirety by reference. The source of B cells for transformation is commonly human peripheral blood, but B cells for transformation may also be derived from other sources including, but not limited to, lymph nodes, tonsil, spleen, tumor tissue, and infected tissues. Tissues are generally made into single cell suspensions prior to EBV transformation. Additionally, steps may be taken to either physically remove or inactivate T cells (e.g., by treatment with cyclosporin A) in B cell-containing samples, because T cells from individuals seropositive for anti-EBV antibodies can suppress B cell immortalization by EBV.

[0301] In general, the sample containing human B cells is innoculated with EBV, and cultured for 34 weeks. A typical source of EBV is the culture supernatant of the B95-8 cell line (ATCC™ #VR-1492). Physical signs of EBV transformation can generally be seen towards the end of the 3-4 week culture period. By phase-contrast microscopy, transformed cells may appear large, clear, hairy and tend to aggregate in tight clusters of cells. Initially, EBV lines are generally polyclonal. However, over prolonged periods of cell cultures, EBV lines may become monoclonal or polyclonal as a result of the selective outgrowth of particular B cell clones. Alternatively, polyclonal EBV transformed lines may be subcloned (e.g., by limiting dilution culture) or fused with a suitable fusion partner and plated at limiting dilution to obtain monoclonal B cell lines. Suitable fusion partners for EBV transformed cell lines include mouse myeloma cell lines (e.g., SP2/0, X63-Ag8.653), heteromyeloma cell lines (human x mouse; e.g, SPAM-8, SBC-H20, and CB-F7), and human cell lines (e.g., GM 1500, SKO-007, RPMI 8226, and KR-4). Thus, the present invention also provides a method of generating polyclonal or monoclonal human antibodies against polypeptides of the invention or fragments thereof, comprising EBV-transformation of human B cells.

[0302] Antibody fragments that recognize specific epitopes may be generated by known techniques. For example, Fab and F(ab′)2 fragments of the invention may be produced by proteolytic cleavage of immunoglobulin molecules, using enzymes such as papain (to produce Fab fragments) or pepsin (to produce F(ab′)2 fragments). F(ab′)2 fragments contain the variable region, the light chain constant region and the CH1 domain of the heavy chain.

[0303] For example, the antibodies of the present invention can also be generated using various phage display methods known in the art. In phage display methods, functional antibody domains are displayed on the surface of phage particles that carry the polynucleotide sequences encoding them. In a particular embodiment, such phage can be utilized to display antigen-binding domains expressed from a repertoire or combinatorial antibody library (e.g., human or murine). Phage expressing an antigen binding domain that binds the antigen of interest can be selected or identified with antigen, e.g., using labeled antigen or antigen bound or captured to a solid surface or bead. Phage used in these methods are typically filamentous phage including fd and M13 binding domains expressed from phage with Fab, Fv or disulfide stabilized Fv antibody domains recombinantly fused to either the phage gene III or gene VIII protein. Examples of phage display methods that can be used to make the antibodies of the present invention include those disclosed in Brinkman et al., J. Immunol. Methods 182:41-50 (1995); Ames et al., J. Immunol. Methods 184:177-186 (1995); Kettleborough et al., Eur. J. Immunol. 24:952-958 (1994); Persic et al., Gene 187 9-18 (1997); Burton et al., Advances in Immunology 57:191-280 (1994); PCT application No. PCT/GB91/01134; PCT publications WO 90/02809; WO 91/10737; WO 92/01047; WO 92/18619; WO 93/11236; WO 95/15982; WO 95/20401; and U.S. Pat. Nos. 5,698,426; 5,223,409; 5,403,484; 5,580,717; 5,427,908; 5,750,753; 5,821,047; 5,571,698; 5,427,908; 5,516,637; 5,780,225; 5,658,727; 5,733,743 and 5,969,108; each of which is incorporated herein by reference in its entirety.

[0304] As described in the above references, after phage selection, the antibody coding regions from the phage can be isolated and used to generate whole antibodies, including human antibodies, or any other desired antigen binding fragment, and expressed in any desired host, including mammalian cells, insect cells, plant cells, yeast, and bacteria, e.g., as described in detail below. For example, techniques to recombinantly produce Fab, Fab′ and F(ab′)2 fragments can also be employed using methods known in the art such as those disclosed in PCT publication WO 92/22324; Mullinax et al., BioTechniques 12(6):864-869 (1992); and Sawai et al., AJRI 34:26-34 (1995); and Better et al., Science 240:1041-1043 (1988) (said references incorporated by reference in their entireties).

[0305] Examples of techniques which can be used to produce single-chain Fvs and antibodies include those described in U.S. Pat. Nos. 4,946,778 and 5,258,498; Huston et al., Methods in Enzymology 203:46-88 (1991); Shu et al., PNAS 90:7995-7999 (1993); and Skerra et al., Science 240:1038-1040 (1988). For some uses, including in vivo use of antibodies in humans and in vitro detection assays, it may be preferable to use chimeric, humanized, or human antibodies. A chimeric antibody is a molecule in which different portions of the antibody are derived from different animal species, such as antibodies having a variable region derived from a murine monoclonal antibody and a human immunoglobulin constant region. Methods for producing chimeric antibodies are known in the art. See e.g., Morrison, Science 229:1202 (1985); Oi et al., BioTechniques 4:214 (1986); Gillies et al., (1989) J. Immunol. Methods 125:191-202; U.S. Pat. Nos. 5,807,715; 4,816,567; and 4,816,397, which are incorporated herein by reference in their entirety. Humanized antibodies are antibody molecules from non-human species antibody that binds the desired antigen having one or more complementarity determining regions (CDRs) from the non-human species and framework regions from a human immunoglobulin molecule. Often, framework residues in the human framework regions will be substituted with the corresponding residue from the CDR donor antibody to alter, preferably improve, antigen binding. These framework substitutions are identified by methods well known in the art, e.g., by modeling of the interactions of the CDR and framework residues to identify framework residues important for antigen binding and sequence comparison to identify unusual framework residues at particular positions. (See, e.g., Queen et al., U.S. Pat. No. 5,585,089; Riechmann et al., Nature 332:323 (1988), which are incorporated herein by reference in their entireties.) Antibodies can be humanized using a variety of techniques known in the art including, for example, CDR-grafting (EP 239,400; PCT publication WO 91/09967; U.S. Pat. Nos. 5,225,539; 5,530,101; and 5,585,089), veneering or resurfacing (EP 592,106; EP 519,596; Padlan, Molecular Immunology 28(4/5):489-498 (1991); Studnicka et al., Protein Engineering 7(6):805-814 (1994); Roguska et al., PNAS 91:969-973 (1994)), and chain shuffling (U.S. Pat. No. 5,565,332).

[0306] Completely human antibodies are particularly desirable for therapeutic treatment of human patients. Human antibodies can be made by a variety of methods known in the art including phage display methods described above using antibody libraries derived from human immunoglobulin sequences. See also, U.S. Pat. Nos. 4,444,887 and 4,716,111; and PCT publications WO 98/46645, WO 98/50433, WO 98/24893, WO 98/16654, WO 96/34096, WO 96/33735, and WO 91/10741; each of which is incorporated herein by reference in its entirety.

[0307] Human antibodies can also be produced using transgenic mice which are incapable of expressing functional endogenous immunoglobulins, but which can express human immunoglobulin genes. For example, the human heavy and light chain immunoglobulin gene complexes may be introduced randomly or by homologous recombination into mouse embryonic stem cells. Alternatively, the human variable region, constant region, and diversity region may be introduced into mouse embryonic stem cells in addition to the human heavy and light chain genes. The mouse heavy and light chain immunoglobulin genes may be rendered non-functional separately or simultaneously with the introduction of human immunoglobulin loci by homologous recombination. In particular, homozygous deletion of the JH region prevents endogenous antibody production. The modified embryonic stem cells are expanded and microinjected into blastocysts to produce chimeric mice. The chimeric mice are then bred to produce homozygous offspring that express human antibodies. The transgenic mice are immunized in the normal fashion with a selected antigen, e.g., all or a portion of a polypeptide of the invention. Monoclonal antibodies directed against the antigen can be obtained from the immunized, transgenic mice using conventional hybridoma technology. The human immunoglobulin transgenes harbored by the transgenic mice rearrange during B cell differentiation, and subsequently undergo class switching and somatic mutation. Thus, using such a technique, it is possible to produce therapeutically useful IgG, IgA, IgM and IgE antibodies. For an overview of this technology for producing human antibodies, see Lonberg and Huszar, Int. Rev. Immunol. 13:65-93 (1995). For a detailed discussion of this technology for producing human antibodies and human monoclonal antibodies and protocols for producing such antibodies, see, e.g., PCT publications WO 98/24893; WO 92/01047; WO 96/34096; WO 96/33735; European Patent No. 0 598 877; U.S. Pat. Nos. 5,413,923; 5,625,126; 5,633,425; 5,569,825; 5,661,016; 5,545,806; 5,814,318; 5,885,793; 5,916,771; 5,939,598; 6,075,181; and 6,114,598, which are incorporated by reference herein in their entirety. In addition, companies such as Abgenix, Inc. (Freemont, Calif.) and Genpharm (San Jose, Calif.) can be engaged to provide human antibodies directed against a selected antigen using technology similar to that described above.

[0308] Completely human antibodies that recognize a selected epitope can be generated using a technique referred to as “guided selection.” In this approach a selected non-human monoclonal antibody, e.g., a mouse antibody, is used to guide the selection of a completely human antibody recognizing the same epitope. (Jespers et al., Bio/technology 12:899-903 (1988)).

[0309] Further, antibodies to the polypeptides of the invention can, in turn, be utilized to generate anti-idiotype antibodies that “mimic” polypeptides of the invention using techniques well known to those skilled in the art. (See, e.g., Greenspan & Bona, FASEB J. 7(5):437-444; (1989) and Nissinoff, J. Immunol. 147(8):2429-2438 (1991)). For example, antibodies which bind to and competitively inhibit polypeptide multimerization and/or binding of a polypeptide of the invention to a ligand can be used to generate anti-idiotypes that “mimic” the polypeptide multimerization and/or binding domain and, as a consequence, bind to and neutralize polypeptide and/or its ligand. Such neutralizing anti-idiotypes or Fab fragments of such anti-idiotypes can be used in therapeutic regimens to neutralize polypeptide ligand(s)/receptor(s). For example, such anti-idiotypic antibodies can be used to bind a polypeptide of the invention and/or to bind its ligand(s)/receptor(s), and thereby block its biological activity. Alternatively, antibodies which bind to and enhance polypeptide multimerization and/or binding, and/or receptor/ligand multimerization, binding and/or signaling can be used to generate anti-idiotypes that function as agonists of a polypeptide of the invention and/or its ligand/receptor. Such agonistic anti-idiotypes or Fab fragments of such anti-idiotypes can be used in therapeutic regimens as agonists of the polypeptides of the invention or its ligand(s)/receptor(s). For example, such anti-idiotypic antibodies can be used to bind a polypeptide of the invention and/or to bind its ligand(s)/receptor(s), and thereby promote or enhance its biological activity.

[0310] Intrabodies of the invention can be produced using methods known in the art, such as those disclosed and reviewed in Chen et al., Hum. Gene Ther. 5:595-601 (1994); Marasco, W. A., Gene Ther. 4:11-15 (1997); Rondon and Marasco, Annu. Rev. Microbiol. 51:257-283 (1997); Proba et al., J. Mol. Biol. 275:245-253 (1998); Cohen et al., Oncogene 17:2445-2456 (1998); Ohage and Steipe, J. Mol. Biol. 291:1119-1128 (1999); Ohage et al., J. Mol. Biol. 291:1129-1134 (1999); Wirtz and Steipe, Protein Sci. 8:2245-2250 (1999); Zhu et al., J. Immunol. Methods 231:207-222 (1999); and references cited therein.

Polynucleotides Encoding Antibodies

[0311] The invention further provides polynucleotides comprising a nucleotide sequence encoding an antibody of the invention and fragments thereof. The invention also encompasses polynucleotides that hybridize under stringent or alternatively, under lower stringency hybridization conditions, e.g., as defined supra, to polynucleotides that encode an antibody, preferably, that specifically binds to a polypeptide of the invention, preferably, an antibody that binds to a polypeptide having the amino acid sequence of SEQ ID NO:Y, to a polypeptide encoded by a portion of SEQ ID NO:X as defined in columns 8 and 9 of Table 2, and/or to a polypeptide encoded by the cDNA contained in ATCC™ Deposit No:Z.

[0312] The polynucleotides may be obtained, and the nucleotide sequence of the polynucleotides determined, by any method known in the art. For example, if the nucleotide sequence of the antibody is known, a polynucleotide encoding the antibody may be assembled from chemically synthesized oligonucleotides (e.g., as described in Kutmeier et al., BioTechniques 17:242 (1994)), which, briefly, involves the synthesis of overlapping oligonucleotides containing portions of the sequence encoding the antibody, annealing and ligating of those oligonucleotides, and then amplification of the ligated oligonucleotides by PCR.

[0313] Alternatively, a polynucleotide encoding an antibody may be generated from nucleic acid from a suitable source. If a clone containing a nucleic acid encoding a particular antibody is not available, but the sequence of the antibody molecule is known, a nucleic acid encoding the immunoglobulin may be chemically synthesized or obtained from a suitable source (e.g., an antibody cDNA library, or a cDNA library generated from, or nucleic acid, preferably poly A+ RNA, isolated from, any tissue or cells expressing the antibody, such as hybridoma cells selected to express an antibody of the invention) by PCR amplification using synthetic primers hybridizable to the 3′ and 5′ ends of the sequence or by cloning using an oligonucleotide probe specific for the particular gene sequence to identify, e.g., a cDNA clone from a cDNA library that encodes the antibody. Amplified nucleic acids generated by PCR may then be cloned into replicable cloning vectors using any method well known in the art.

[0314] Once the nucleotide sequence and corresponding amino acid sequence of the antibody is determined, the nucleotide sequence of the antibody may be manipulated using methods well known in the art for the manipulation of nucleotide sequences, e.g., recombinant DNA techniques, site directed mutagenesis, PCR, etc. (see, for example, the techniques described in Sambrook et al., 1990, Molecular Cloning, A Laboratory Manual, 2d Ed., Cold Spring Harbor Laboratory, Cold Spring Harbor, N.Y. and Ausubel et al., eds., 1998, Current Protocols in Molecular Biology, John Wiley & Sons, NY, which are both incorporated by reference herein in their entireties), to generate antibodies having a different amino acid sequence, for example to create amino acid substitutions, deletions, and/or insertions.

[0315] In a specific embodiment, the amino acid sequence of the heavy and/or light chain variable domains may be inspected to identify the sequences of the complementarity determining regions (CDRs) by methods that are well know in the art, e.g., by comparison to known amino acid sequences of other heavy and light chain variable regions to determine the regions of sequence hypervariability. Using routine recombinant DNA techniques, one or more of the CDRs may be inserted within framework regions, e.g., into human framework regions to humanize a non-human antibody, as described supra. The framework regions may be naturally occurring or consensus framework regions, and preferably human framework regions (see, e.g., Chothia et al., J. Mol. Biol. 278: 457-479 (1998) for a listing of human framework regions). Preferably, the polynucleotide generated by the combination of the framework regions and CDRs encodes an antibody that specifically binds a polypeptide of the invention. Preferably, as discussed supra, one or more amino acid substitutions may be made within the framework regions, and, preferably, the amino acid substitutions improve binding of the antibody to its antigen. Additionally, such methods may be used to make amino acid substitutions or deletions of one or more variable region cysteine residues participating in an intrachain disulfide bond to generate antibody molecules lacking one or more intrachain disulfide bonds. Other alterations to the polynucleotide are encompassed by the present invention and within the skill of the art.

[0316] In addition, techniques developed for the production of “chimeric antibodies” (Morrison et al., Proc. Natl. Acad. Sci. 81:851-855 (1984); Neuberger et al., Nature 312:604-608 (1984); Takeda et al., Nature 314:452-454 (1985)) by splicing genes from a mouse antibody molecule of appropriate antigen specificity together with genes from a human antibody molecule of appropriate biological activity can be used. As described supra, a chimeric antibody is a molecule in which different portions are derived from different animal species, such as those having a variable region derived from a murine mAb and a human immunoglobulin constant region, e.g., humanized antibodies.

[0317] Alternatively, techniques described for the production of single chain antibodies (U.S. Pat. No. 4,946,778; Bird, Science 242:423-42 (1988); Huston et al., Proc. Natl. Acad. Sci. USA 85:5879-5883 (1988); and Ward et al., Nature 334:544-54 (1989)) can be adapted to produce single chain antibodies. Single chain antibodies are formed by linking the heavy and light chain fragments of the Fv region via an amino acid bridge, resulting in a single chain polypeptide. Techniques for the assembly of functional Fv fragments in E. coli may also be used (Skerra et al., Science 242:1038-1041 (1988)).

Methods of Producing Antibodies

[0318] The antibodies of the invention can be produced by any method known in the art for the synthesis of antibodies, in particular, by chemical synthesis or preferably, by recombinant expression techniques. Methods of producing antibodies include, but are not limited to, hybridoma technology, EBV transformation, and other methods discussed herein as well as through the use recombinant DNA technology, as discussed below.

[0319] Recombinant expression of an antibody of the invention, or fragment, derivative or analog thereof, (e.g., a heavy or light chain of an antibody of the invention or a single chain antibody of the invention), requires construction of an expression vector containing a polynucleotide that encodes the antibody. Once a polynucleotide encoding an antibody molecule or a heavy or light chain of an antibody, or portion thereof (preferably containing the heavy or light chain variable domain), of the invention has been obtained, the vector for the production of the antibody molecule may be produced by recombinant DNA technology using techniques well known in the art. Thus, methods for preparing a protein by expressing a polynucleotide containing an antibody encoding nucleotide sequence are described herein. Methods that are well known to those skilled in the art can be used to construct expression vectors containing antibody coding sequences and appropriate transcriptional and translational control signals. These methods include, for example, in vitro recombinant DNA techniques, synthetic techniques, and in vivo genetic recombination. The invention, thus, provides replicable vectors comprising a nucleotide sequence encoding an antibody molecule of the invention, or a heavy or light chain thereof, or a heavy or light chain variable domain, operably linked to a promoter. Such vectors may include the nucleotide sequence encoding the constant region of the antibody molecule (see, e.g., PCT Publication WO 86/05807; PCT Publication WO 89/01036; and U.S. Pat. No. 5,122,464) and the variable domain of the antibody may be cloned into such a vector for expression of the entire heavy or light chain.

[0320] The expression vector is transferred to a host cell by conventional techniques and the transfected cells are then cultured by conventional techniques to produce an antibody of the invention. Thus, the invention includes host cells containing a polynucleotide encoding an antibody of the invention, or a heavy or light chain thereof, or a single chain antibody of the invention, operably linked to a heterologous promoter. In preferred embodiments for the expression of double-chained antibodies, vectors encoding both the heavy and light chains may be co-expressed in the host cell for expression of the entire immunoglobulin molecule, as detailed below.

[0321] A variety of host-expression vector systems may be utilized to express the antibody molecules of the invention. Such host-expression systems represent vehicles by which the coding sequences of interest may be produced and subsequently purified, but also represent cells which may, when transformed or transfected with the appropriate nucleotide coding sequences, express an antibody molecule of the invention in situ. These include but are not limited to microorganisms such as bacteria (e.g., E. coli, B. subtilis) transformed with recombinant bacteriophage DNA, plasmid DNA or cosmid DNA expression vectors containing antibody coding sequences; yeast (e.g., Saccharomyces, Pichia) transformed with recombinant yeast expression vectors containing antibody coding sequences; insect cell systems infected with recombinant virus expression vectors (e.g., baculovirus) containing antibody coding sequences; plant cell systems infected with recombinant virus expression vectors (e.g., cauliflower mosaic virus, CaMV; tobacco mosaic virus, TMV) or transformed with recombinant plasmid expression vectors (e.g., Ti plasmid) containing antibody coding sequences; or mammalian cell systems (e.g., COS, CHO, BHK, 293, 3T3 cells) harboring recombinant expression constructs containing promoters derived from the genome of mammalian cells (e.g., metallothionein promoter) or from mammalian viruses (e.g., the adenovirus late promoter; the vaccinia virus 7.5K promoter). Preferably, bacterial cells such as Escherichia coli, and more preferably, eukaryotic cells, especially for the expression of whole recombinant antibody molecule, are used for the expression of a recombinant antibody molecule. For example, mammalian cells such as Chinese hamster ovary cells (CHO), in conjunction with a vector such as the major intermediate early gene promoter element from human cytomegalovirus is an effective expression system for antibodies (Foecking et al., Gene 45:101 (1986); Cockett et al., Bio/Technology 8:2 (1990)).

[0322] In bacterial systems, a number of expression vectors may be advantageously selected depending upon the use intended for the antibody molecule being expressed. For example, when a large quantity of such a protein is to be produced, for the generation of pharmaceutical compositions of an antibody molecule, vectors which direct the expression of high levels of fusion protein products that are readily purified may be desirable. Such vectors include, but are not limited, to the E. coli expression vector pUR278 (Ruther et al., EMBO J. 2:1791 (1983)), in which the antibody coding sequence may be ligated individually into the vector in frame with the lac Z coding region so that a fusion protein is produced; pIN vectors (Inouye & Inouye, Nucleic Acids Res. 13:3101-3109 (1985); Van Heeke & Schuster, J. Biol. Chem. 24:5503-5509 (1989)); and the like. pGEX vectors may also be used to express foreign polypeptides as fusion proteins with glutathione S-transferase (GST). In general, such fusion proteins are soluble and can easily be purified from lysed cells by adsorption and binding to matrix glutathione-agarose beads followed by elution in the presence of free glutathione. The pGEX vectors are designed to include thrombin or factor Xa protease cleavage sites so that the cloned target gene product can be released from the GST moiety.

[0323] In an insect system, Autographa californica nuclear polyhedrosis virus (AcNPV) is used as a vector to express foreign genes. The virus grows in Spodoptera frugiperda cells. The antibody coding sequence may be cloned individually into non-essential regions (for example the polyhedrin gene) of the virus and placed under control of an AcNPV promoter (for example the polyhedrin promoter).

[0324] In mammalian host cells, a number of viral-based expression systems may be utilized. In cases where an adenovirus is used as an expression vector, the antibody coding sequence of interest may be ligated to an adenovirus transcription/translation control complex, e.g., the late promoter and tripartite leader sequence. This chimeric gene may then be inserted in the adenovirus genome by in vitro or in vivo recombination. Insertion in a non-essential region of the viral genome (e.g., region E1 or E3) will result in a recombinant virus that is viable and capable of expressing the antibody molecule in infected hosts. (e.g., see Logan & Shenk, Proc. Natl. Acad. Sci. USA 81:355-359 (1984)). Specific initiation signals may also be required for efficient translation of inserted antibody coding sequences. These signals include the ATG initiation codon and adjacent sequences. Furthermore, the initiation codon must be in phase with the reading frame of the desired coding sequence to ensure translation of the entire insert. These exogenous translational control signals and initiation codons can be of a variety of origins, both natural and synthetic. The efficiency of expression may be enhanced by the inclusion of appropriate transcription enhancer elements, transcription terminators, etc. (see Bittner et al., Methods in Enzymol. 153:51-544 (1987)).

[0325] In addition, a host cell strain may be chosen which modulates the expression of the inserted sequences, or modifies and processes the gene product in the specific fashion desired. Such modifications (e.g., glycosylation) and processing (e.g., cleavage) of protein products may be important for the function of the protein. Different host cells have characteristic and specific mechanisms for the post-translational processing and modification of proteins and gene products. Appropriate cell lines or host systems can be chosen to ensure the correct modification and processing of the foreign protein expressed. To this end, eukaryotic host cells which possess the cellular machinery for proper processing of the primary transcript, glycosylation, and phosphorylation of the gene product may be used. Such mammalian host cells include but are not limited to CHO, VERY, BHK, Hela, COS, MDCK, 293, 3T3, WI38, and in particular, breast cancer cell lines such as, for example, BT483, Hs578T, HTB2, BT20 and T47D, and normal mammary gland cell line such as, for example, CRL7030 and Hs578Bst.

[0326] For long-term, high-yield production of recombinant proteins, stable expression is preferred. For example, cell lines which stably express the antibody molecule may be engineered. Rather than using expression vectors which contain viral origins of replication, host cells can be transformed with DNA controlled by appropriate expression control elements (e.g., promoter, enhancer, sequences, transcription terminators, polyadenylation sites, etc.), and a selectable marker. Following the introduction of the foreign DNA, engineered cells may be allowed to grow for 1-2 days in an enriched media, and then are switched to a selective media. The selectable marker in the recombinant plasmid confers resistance to the selection and allows cells to stably integrate the plasmid into their chromosomes and grow to form foci which in turn can be cloned and expanded into cell lines. This method may advantageously be used to engineer cell lines which express the antibody molecule. Such engineered cell lines may be particularly useful in screening and evaluation of compounds that interact directly or indirectly with the antibody molecule.

[0327] A number of selection systems may be used, including but not limited to the herpes simplex virus thymidine kinase (Wigler et al., Cell 11:223 (1977)), hypoxanthine-guanine phosphoribosyltransferase (Szybalska & Szybalski, Proc. Natl. Acad. Sci. USA 48:202 (1992)), and adenine phosphoribosyltransferase (Lowy et al., Cell 22:817 (1980)) genes can be employed in tk-, hgprt- or aprt-cells, respectively. Also; antimetabolite resistance can be used as the basis of selection for the following genes: dhfr, which confers resistance to methotrexate (Wigler et al., Natl. Acad. Sci. USA 77:357 (1980); O'Hare et al., Proc. Natl. Acad. Sci. USA 78:1527 (1981)); gpt, which confers resistance to mycophenolic acid (Mulligan & Berg, Proc. Natl. Acad. Sci. USA 78:2072 (1981)); neo, which confers resistance to the aminoglycoside G-418 Clinical Pharmacy 12:488-505; Wu and Wu, Biotherapy 3:87-95 (1991); Tolstoshev, Ann. Rev. Pharmacol. Toxicol. 32:573-596 (1993); Mulligan, Science 260:926-932 (1993); and Morgan and Anderson, Ann. Rev. Biochem. 62:191-217 (1993); May, 1993, T31B TECH 11(5):155-215 (1993)); and hygro, which confers resistance to hygromycin (Santerre et al., Gene 30:147 (1984)). Methods commonly known in the art of recombinant DNA technology may be routinely applied to select the desired recombinant clone, and such methods are described, for example, in Ausubel et al. (eds.), Current Protocols in Molecular Biology, John Wiley & Sons, NY (1993); Kriegler, Gene Transfer and Expression, A Laboratory Manual, Stockton Press, NY (1990); and in Chapters 12 and 13, Dracopoli et al. (eds), Current Protocols in Human Genetics, John Wiley & Sons, NY (1994); Colberre-Garapin et al., J. Mol. Biol. 150:1 (1981), which are incorporated by reference herein in their entireties.

[0328] The expression levels of an antibody molecule can be increased by vector amplification (for a review, see Bebbington and Hentschel, The use of vectors based on gene amplification for the expression of cloned genes in mammalian cells in DNA cloning, Vol. 3. (Academic Press, New York, 1987)). When a marker in the vector system expressing antibody is amplifiable, increase in the level of inhibitor present in culture of host cell will increase the number of copies of the marker gene. Since the amplified region is associated with the antibody gene, production of the antibody will also increase (Crouse et al., Mol. Cell. Biol. 3:257 (1983)).

[0329] Vectors which use glutamine synthase (GS) or DHFR as the selectable markers can be amplified in the presence of the drugs methionine sulphoximine or methotrexate, respectively. An advantage of glutamine synthase based vectors are the availability of cell lines (e.g., the murine myeloma cell line, NS0) which are glutamine synthase negative. Glutamine synthase expression systems can also function in glutamine synthase expressing cells (e.g. Chinese Hamster Ovary (CHO) cells) by providing additional inhibitor to prevent the functioning of the endogenous gene. A glutamine synthase expression system and components thereof are detailed in PCT publications: WO87/04462; WO86/05807; WO89/01036; WO89/10404; and WO91/06657 which are incorporated in their entireties by reference herein. Additionally, glutamine synthase expression vectors that may be used according to the present invention are commercially available from suppliers, including, for example Lonza Biologics, Inc. (Portsmouth, N.H.). Expression and production of monoclonal antibodies using a GS expression system in murine myeloma cells is described in Bebbington et al., Bio/technology 10:169(1992) and in Biblia and Robinson Biotechnol. Prog. 11:1 (1995) which are incorporated in their entireties by reference herein.

[0330] The host cell may be co-transfected with two expression vectors of the invention, the first vector encoding a heavy chain derived polypeptide and the second vector encoding a light chain derived polypeptide. The two vectors may contain identical selectable markers which enable equal expression of heavy and light chain polypeptides. Alternatively, a single vector may be used which encodes, and is capable of expressing, both heavy and light chain polypeptides. In such situations, the light chain should be placed before the heavy chain to avoid an excess of toxic free heavy chain (Proudfoot, Nature 322:52 (1986); Kohler, Proc. Natl. Acad. Sci. USA 77:2197 (1980)). The coding sequences for the heavy and light chains may comprise cDNA or genomic DNA.

[0331] Once an antibody molecule of the invention has been produced by an animal, chemically synthesized, or recombinantly expressed, it may be purified by any method known in the art for purification of an immunoglobulin molecule, for example, by chromatography (e.g., ion exchange, affinity, particularly by affinity for the specific antigen after Protein A, and sizing column chromatography), centrifugation, differential solubility, or by any other standard technique for the purification of proteins. In addition, the antibodies of the present invention or fragments thereof can be fused to heterologous polypeptide sequences described herein or otherwise known in the art, to facilitate purification.

[0332] The present invention encompasses antibodies recombinantly fused or chemically conjugated (including both covalently and non-covalently conjugations) to a polypeptide (or portion thereof, preferably at least 10, 20, 30, 40, 50, 60, 70, 80, 90 or 100 amino acids of the polypeptide) of the present invention to generate fusion proteins. The fusion does not necessarily need to be direct, but may occur through linker sequences. The antibodies may be specific for antigens other than polypeptides (or portion thereof, preferably at least 10, 20, 30, 40, 50, 60, 70, 80, 90 or 100 amino acids of the polypeptide) of the present invention. For example, antibodies may be used to target the polypeptides of the present invention to particular cell types, either in vitro or in vivo, by fusing or conjugating the polypeptides of the present invention to antibodies specific for particular cell surface receptors. Antibodies fused or conjugated to the polypeptides of the present invention may also be used in in vitro immunoassays and purification methods using methods known in the art See e.g., Harbor et al., supra, and PCT publication WO 93/21232; EP 439,095; Naramura et al., Immunol. Len. 39:91-99 (1994); U.S. Pat. No. 5,474,981; Gillies et al., PNAS 89:1428-1432 (1992); Fell et al., J. Immunol. 146:2446-2452 (1991), which are incorporated by reference in their entireties.

[0333] The present invention further includes compositions comprising the polypeptides of the present invention fused or conjugated to antibody domains other than the variable regions. For example, the polypeptides of the present invention may be fused or conjugated to an antibody Fc region, or portion thereof. The antibody portion fused to a polypeptide of the present invention may comprise the constant region, hinge region, CH1 domain, CH2 domain, and CH3 domain or any combination of whole domains or portions thereof. The polypeptides may also be fused or conjugated to the above antibody portions to form multimers. For example, Fc portions fused to the polypeptides of the present invention can form dimers through disulfide bonding between the Fc portions. Higher multimeric forms can be made by fusing the polypeptides to portions of IgA and IgM. Methods for fusing or conjugating the polypeptides of the present invention to antibody portions are known in the art. See, e.g., U.S. Pat. Nos. 5,336,603; 5,622,929; 5,359,046; 5,349,053; 5,447,851; 5,112,946; EP 307,434; EP 367,166; PCT publications WO 96/04388; WO 91/06570; Ashkenazi et al., Proc. Natl. Acad. Sci. USA 88:10535-10539 (1991); Zheng et al., J. Immunol. 154:5590-5600 (1995); and Vil et al., Proc. Natl. Acad. Sci. USA 89:11337-11341 (1992) (said references incorporated by reference in their entireties).

[0334] As discussed, supra, the polypeptides corresponding to a polypeptide, polypeptide fragment, or a variant of SEQ ID NO:Y may be fused or conjugated to the above antibody portions to increase the in vivo half life of the polypeptides or for use in immunoassays using methods known in the art. Further, the polypeptides corresponding to SEQ ID NO:Y may be fused or conjugated to the above antibody portions to facilitate purification. One reported example describes chimeric proteins consisting of the first two domains of the human CD4-polypeptide and various domains of the constant regions of the heavy or light chains of mammalian immunoglobulins. See EP 394,827; and Traunecker et al., Nature 331:84-86 (1988). The polypeptides of the present invention fused or conjugated to an antibody having disulfide-linked dimeric structures (due to the IgG) may also be more efficient in binding and neutralizing other molecules, than the monomeric secreted protein or protein fragment alone. See, for example, Fountoulakis et al., J. Biochem. 270:3958-3964 (1995). In many cases, the Fc part in a fusion protein is beneficial in therapy and diagnosis, and thus can result in, for example, improved pharmacokinetic properties. See, for example, EP A 232,262. Alternatively, deleting the Fc part after the fusion protein has been expressed, detected, and purified, would be desired. For example, the Fc portion may hinder therapy and diagnosis if the fusion protein is used as an antigen for immunizations. In drug discovery, for example, human proteins, such as hIL-5, have been fused with Fc portions for the purpose of high-throughput screening assays to identify antagonists of hIL-5. (See, Bennett et al., J. Molecular Recognition 8:52-58 (1995); Johanson et al., J. Biol. Chem. 270:9459-9471 (1995)).

[0335] Moreover, the antibodies or fragments thereof of the present invention can be fused to marker sequences, such as a peptide to facilitate purification. In preferred embodiments, the marker amino acid sequence is a hexa-histidine peptide, such as the tag provided in a pQE vector (QIAGEN, Inc., 9259 Eton Avenue, Chatsworth, Calif., 91311), among others, many of which are commercially available. As described in Gentz et al., Proc. Natl. Acad. Sci. USA 86:821-824 (1989), for instance, hexa-histidine provides for convenient purification of the fusion protein. Other peptide tags useful for purification include, but are not limited to, the “HA” tag, which corresponds to an epitope derived from the influenza hemagglutinin protein (Wilson et al., Cell 37:767 (1984)) and the “flag” tag.

[0336] The present invention further encompasses antibodies or fragments thereof conjugated to a diagnostic or therapeutic agent. The antibodies can be used diagnostically to, for example, monitor the development or progression of a tumor as part of a clinical testing procedure to, e.g., determine the efficacy of a given treatment regimen. Detection can be facilitated by coupling the antibody to a detectable substance. Examples of detectable substances include various enzymes, prosthetic groups, fluorescent materials, luminescent materials, bioluminescent materials, radioactive materials, positron emitting metals using various positron emission tomographies, and nonradioactive paramagnetic metal ions. The detectable substance may be coupled or conjugated either directly to the antibody (or fragment thereof) or indirectly, through an intermediate (such as, for example, a linker known in the art) using techniques known in the art. See, for example, U.S. Pat. No. 4,741,900 for metal ions that can be conjugated to antibodies for use as diagnostics according to the present invention. Examples of suitable enzymes include horseradish peroxidase, alkaline phosphatase, beta-galactosidase, or acetylcholinesterase; examples of suitable prosthetic group complexes include streptavidin/biotin and avidin/biotin; examples of suitable fluorescent materials include umbelliferone, fluorescein, fluorescein isothiocyanate, rhodamine, dichlorotriazinylamine fluorescein, dansyl chloride or phycoerythrin; an example of a luminescent material includes luminol; examples of bioluminescent materials include luciferase, luciferin, and aequorin; and examples of suitable radioactive material include 125I, 131I, 111In or 99Tc.

[0337] Further, an antibody or fragment thereof may be conjugated to a therapeutic moiety such as a cytotoxin, e.g., a cytostatic or cytocidal agent, a therapeutic agent or a radioactive metal ion, e.g., alpha-emitters such as, for example, 213Bi. A cytotoxin or cytotoxic agent includes any agent that is detrimental to cells. Examples include paclitaxol, cytochalasin B, gramicidin D, ethidium bromide, emetine, mitomycin, etoposide, tenoposide, vincristine, vinblastine, colchicin, doxorubicin, daunorubicin, dihydroxy anthracin dione, mitoxantrone, mithramycin, actinomycin D, 1-dehydrotestosterone, glucocorticoids, procaine, tetracaine, lidocaine, propranolol, and puromycin and analogs or homologs thereof. Therapeutic agents include, but are not limited to, antimetabolites (e.g., methotrexate, 6-mercaptopurine, 6-thioguanine, cytarabine, 5-fluorouracil decarbazine), alkylating agents (e.g., mechlorethamine, thioepa chlorambucil, melphalan, carmustine (BSNU) and lomustine (CCNU), cyclothosphamide, busulfan, dibromomannitol, streptozotocin, mitomycin C, and cis-dichlorodiamine platinum (II) (DDP) cisplatin), anthracyclines (e.g., daunorubicin (formerly daunomycin) and doxorubicin), antibiotics (e.g., dactinomycin (formerly actinomycin), bleomycin, mithramycin, and anthramycin (AMC)), and anti-mitotic agents (e.g., vincristine and vinblastine).

[0338] The conjugates of the invention can be used for modifying a given biological response, the therapeutic agent or drug moiety is not to be construed as limited to classical chemical therapeutic agents. For example, the drug moiety may be a protein or polypeptide possessing a desired biological activity. Such proteins may include, for example, a toxin such as abrin, ricin A, pseudomonas exotoxin, or diphtheria toxin; a protein such as tumor necrosis factor, a-interferon, β-interferon, nerve growth factor, platelet derived growth factor, tissue plasminogen activator, an apoptotic agent, e.g., TNF-alpha, TNF-beta, AIM I (See, International Publication No. WO 97/33899), AIM II (See, International Publication No. WO97/34911), Fas Ligand (Takahashi et al., Int. Immunol., 6:1567-1574 (1994)), VEGI (See, International Publication No. WO99/23105), a thrombotic agent or an anti-angiogenic agent, e.g., angiostatin or endostatin; or, biological response modifiers such as, for example, lymphokines, interleukin-1 (“IL-1”), interleukin-2 (“IL-2”), interleukin-6 (“IL-6”), granulocyte macrophage colony stimulating factor (“GM-CSF”), granulocyte colony stimulating factor (“G-CSF”), or other growth factors.

[0339] Antibodies may also be attached to solid supports, which are particularly useful for immunoassays or purification of the target antigen. Such solid supports include, but are not limited to, glass, cellulose, polyacrylamide, nylon, polystyrene, polyvinyl chloride or polypropylene.

[0340] Techniques for conjugating such therapeutic moiety to antibodies are well known. See, for example, Amon et al., “Monoclonal Antibodies For Immunotargeting Of Drugs In Cancer Therapy”, in Monoclonal Antibodies And Cancer Therapy, Reisfeld et al. (eds.), pp. 243-56 (Alan R. Liss, Inc. 1985); Hellstrom et al., “Antibodies For Drug Delivery”, in Controlled Drug Delivery (2nd Ed.), Robinson et al. (eds.), pp. 623-53 (Marcel Dekker, Inc. 1987); Thorpe, “Antibody Carriers Of Cytotoxic Agents In Cancer Therapy: A Review”, in Monoclonal Antibodies '84: Biological And Clinical Applications, Pinchera et al. (eds.), pp. 475-506 (1985); “Analysis, Results, And Future Prospective Of The Therapeutic Use Of Radiolabeled Antibody In Cancer Therapy”, in Monoclonal Antibodies For Cancer Detection And Therapy, Baldwin et al. (eds.), pp. 303-16 (Academic Press 1985), and Thorpe et al., “The Preparation And Cytotoxic Properties Of Antibody-Toxin Conjugates”, Immunol. Rev. 62:119-58 (1982).

[0341] Alternatively, an antibody can be conjugated to a second antibody to form an antibody heteroconjugate as described by Segal in U.S. Pat. No. 4,676,980, which is incorporated herein by reference in its entirety.

[0342] An antibody, with or without a therapeutic moiety conjugated to it, administered alone or in combination with cytotoxic factor(s) and/or cytokine(s) can be used as a therapeutic.

Immunophenotyping

[0343] The antibodies of the invention may be utilized for immunophenotyping of cell lines and biological samples. Translation products of the gene of the present invention may be useful as cell-specific markers, or more specifically as cellular markers that are differentially expressed at various stages of differentiation and/or maturation of particular cell types. Monoclonal antibodies directed against a specific epitope, or combination of epitopes, will allow for the screening of cellular populations expressing the marker. Various techniques can be utilized using monoclonal antibodies to screen for cellular populations expressing the marker(s), and include magnetic separation using antibody-coated magnetic beads, “panning” with antibody attached to a solid matrix (i.e., plate), and flow cytometry (See, e.g., U.S. Pat. No. 5,985,660; and Morrison et al., Cell, 96:73749 (1999)).

[0344] These techniques allow for the screening of particular populations of cells, such as might be found with hematological malignancies (i.e. minimal residual disease (MRD) in acute leukemic patients) and “non-self” cells in transplantations to prevent Graft-versus-Host Disease (GVHD). Alternatively, these techniques allow for the screening of hematopoietic stem and progenitor cells capable of undergoing proliferation and/or differentiation, as might be found in human umbilical cord blood.

Assays for Antibody Binding

[0345] The antibodies of the invention may be assayed for immunospecific binding by any method known in the art. The immunoassays which can be used include but are not limited to competitive and non-competitive assay systems using techniques such as western blots, radioimmunoassays, ELISA (enzyme linked immunosorbent assay), “sandwich” immunoassays, immunoprecipitation assays, precipitin reactions, gel diffusion precipitin reactions, immunodiffusion assays, agglutination assays, complement-fixation assays, immunoradiometric assays, fluorescent immunoassays, and protein A immunoassays, to name but a few. Such assays are routine and well known in the art (see, e.g., Ausubel et al, eds, 1994, Current Protocols in Molecular Biology, Vol. 1, John Wiley & Sons, Inc., New York, which is incorporated by reference herein in its entirety). Exemplary immunoassays are described briefly below (but are not intended by way of limitation).

[0346] Immunoprecipitation protocols generally comprise lysing a population of cells in a lysis buffer such as RIPA buffer (1% NP-40 or Triton X-100, 1% sodium deoxycholate, 0.1% SDS, 0.15 M NaCl, 0.01 M sodium phosphate at pH 7.2, 1% Trasylol) supplemented with protein phosphatase and/or protease inhibitors (e.g., EDTA, PMSF, aprotinin, sodium vanadate), adding the antibody of interest to the cell lysate, incubating for a period of time (e.g., 14 hours) at 4° C., adding protein A and/or protein G sepharose beads to the cell lysate, incubating for about an hour or more at 4° C., washing the beads in lysis buffer and resuspending the beads in SDS/sample buffer. The ability of the antibody of interest to immunoprecipitate a particular antigen can be assessed by, e.g., western blot analysis. One of skill in the art would be knowledgeable as to the parameters that can be modified to increase the binding of the antibody to an antigen and decrease the background (e.g., pre-clearing the cell lysate with sepharose beads). For further discussion regarding immunoprecipitation protocols see, e.g., Ausubel et al., eds., (1994), Current Protocols in Molecular Biology, Vol. 1, John Wiley & Sons, Inc., New York, section 10.16.1.

[0347] Western blot analysis generally comprises preparing protein samples, electrophoresis of the protein samples in a polyacrylamide gel (e.g., 8%-20% SDS-PAGE depending on the molecular weight of the antigen), transferring the protein sample from the polyacrylamide gel to a membrane such as nitrocellulose, PVDF or nylon, blocking the membrane in blocking solution (e.g., PBS with 3% BSA or non-fat milk), washing the membrane in washing buffer (e.g., PBS-Tween 20), blocking the membrane with primary antibody (the antibody of interest) diluted in blocking buffer, washing the membrane in washing buffer, blocking the membrane with a secondary antibody (which recognizes the primary antibody, e.g., an anti-human antibody) conjugated to an enzymatic substrate (e.g., horseradish peroxidase or alkaline phosphatase) or radioactive molecule (e.g., 32P or 125I) diluted in blocking buffer, washing the membrane in wash buffer, and detecting the presence of the antigen. One of skill in the art would be knowledgeable as to the parameters that can be modified to increase the signal detected and to reduce the background noise. For further discussion regarding western blot protocols see, e.g., Ausubel et al, eds, (1994), Current Protocols in Molecular Biology, Vol. 1, John Wiley & Sons, Inc., New York, section 10.8.1.

[0348] ELISAs comprise preparing antigen, coating the well of a 96 well microtiter plate with the antigen, adding the antibody of interest conjugated to a detectable compound such as an enzymatic substrate (e.g., horseradish peroxidase or alkaline phosphatase) to the well and incubating for a period of time, and detecting the presence of the antigen. In ELISAs the antibody of interest does not have to be conjugated to a detectable compound; instead, a second antibody (which recognizes the antibody of interest) conjugated to a detectable compound may be added to the well. Further, instead of coating the well with the antigen, the antibody may be coated to the well. In this case, a second antibody conjugated to a detectable compound may be added following the addition of the antigen of interest to the coated well. One of skill in the art would be knowledgeable as to the parameters that can be modified to increase the signal detected as well as other variations of ELISAs known in the art. For further discussion regarding ELISAs see, e.g., Ausubel et al, eds, (1994), Current Protocols in Molecular Biology, Vol. 1, John Wiley & Sons, Inc., New York, section 11.2.1.

[0349] The binding affinity of an antibody to an antigen and the off-rate of an antibody-antigen interaction can be determined by competitive binding assays. One example of a competitive binding assay is a radioimmunoassay comprising the incubation of labeled antigen (e.g., 3H or 125I) with the antibody of interest in the presence of increasing amounts of unlabeled antigen, and the detection of the antibody bound to the labeled antigen. The affinity of the antibody of interest for a particular antigen and the binding off-rates can be determined from the data by scatchard plot analysis. Competition with a second antibody can also be determined using radioimmunoassays. In this case, the antigen is incubated with antibody of interest conjugated to a labeled compound (e.g., 3H or 125I) in the presence of increasing amounts of an unlabeled second antibody.

[0350] Antibodies of the invention may be characterized using immunocytochemisty methods on cells (e.g., mammalian cells, such as CHO cells) transfected with a vector enabling the expression of an antigen or with vector alone using techniques commonly known in the art. Antibodies that bind antigen transfected cells, but not vector-only transfected cells, are antigen specific.

Therapeutic Uses

[0351] Tables 1D.1 and 1D.2 also provide information regarding biological activities and preferred therapeutic uses (i.e. see, “Preferred Indications” column) for polynucleotides and polypeptides of the invention (including antibodies, agonists, and/or antagonists thereof). Tables 1D.1 and 1D.2 also provide information regarding assays which may be used to test polynucleotides and polypeptides of the invention (including antibodies, agonists, and/or antagonists thereof) for the corresponding biological activities. The first column (“Gene No.”) provides the gene number in the application for each clone identifier. The second column (“cDNA ATCC™ Deposit No:Z”) provides the unique clone identifier for each clone as previously described and indicated in Table 1A, Table 1B, and Table 1C. The third column (“AA SEQ ID NO:Y”) indicates the Sequence Listing SEQ ID Number for polypeptide sequences encoded by the corresponding cDNA clones (also as indicated in Table 1A, Table 1B, and Table 2). The fourth column (“Biological Activity”) indicates a biological activity corresponding to the indicated polypeptides (or polynucleotides encoding said polypeptides). The fifth column (“Exemplary Activity Assay”) further describes the corresponding biological activity and also provides information pertaining to the various types of assays that may be performed to test, demonstrate, or quantify the corresponding biological activity.

[0352] The present invention is further directed to antibody-based therapies which involve administering antibodies of the invention to an animal, preferably a mammal, and most preferably a human, patient for treating one or more of the disclosed diseases, disorders, or conditions. Therapeutic compounds of the invention include, but are not limited to, antibodies of the invention (including fragments, analogs and derivatives thereof as described herein) and nucleic acids encoding antibodies of the invention (including fragments, analogs and derivatives thereof and anti-idiotypic antibodies as described herein). The antibodies of the invention can be used to detect, prevent, diagnose, prognosticate, treat, and/or ameliorate diseases, disorders or conditions associated with aberrant expression and/or activity of a polypeptide of the invention, including, but not limited to, allergic and/or asthmatic diseases and disorders. The treatment and/or prevention of allergic and/or asthmatic diseases and disorders associated with aberrant expression and/or activity of a polypeptide of the invention includes, but is not limited to, alleviating symptoms associated with allergic and/or asthmatic diseases and disorders. Antibodies of the invention may be provided in pharmaceutically acceptable compositions as known in the art or as described herein.

[0353] In a specific and preferred embodiment, the present invention is directed to antibody-based therapies which involve administering antibodies of the invention to an animal, preferably a mammal, and most preferably a human, patient for treating allergic and/or asthmatic diseases and disorders. Therapeutic compounds of the invention include, but are not limited to, antibodies of the invention (e.g., antibodies directed to the full length protein expressed on the cell surface of a mammalian cell; antibodies directed to an epitope of a polypeptide of the invention (such as, for example, a predicted linear epitope shown in Table 1B; or a conformational epitope, including fragments, analogs and derivatives thereof as described herein) and nucleic acids encoding antibodies of the invention (including fragments, analogs and derivatives thereof and anti-idiotypic antibodies as described herein). The antibodies of the invention can be used to detect, diagnose, prevent, treat, prognosticate, and/or ameliorate allergic and/or asthmatic diseases, disorders or conditions associated with aberrant expression and/or activity of a polypeptide of the invention. The treatment and/or prevention of allergic and/or asthmatic diseases, disorders or conditions associated with aberrant expression and/or activity of a polypeptide of the invention includes, but is not limited to, alleviating symptoms associated with those diseases, disorders or conditions. Antibodies of the invention may be provided in pharmaceutically acceptable compositions as known in the art or as described herein.

[0354] A summary of the ways in which the antibodies of the present invention may be used therapeutically includes binding polynucleotides or polypeptides of the present invention locally or systemically in the body or by direct cytotoxicity of the antibody, e.g. as mediated by complement (CDC) or by effector cells (ADCC). Some of these approaches are described in more detail below. Armed with the teachings provided herein, one of ordinary skill in the art will know how to use the antibodies of the present invention for diagnostic, monitoring or therapeutic purposes without undue experimentation.

[0355] The antibodies of this invention may be advantageously utilized in combination with other monoclonal or chimeric antibodies, or with lymphokines or hematopoietic growth factors (such as, e.g., IL-2, IL-3 and IL-7), for example, which serve to increase the number or activity of effector cells that interact with the antibodies.

[0356] The antibodies of the invention may be administered alone or in combination with other types of treatments (e.g., radiation therapy, chemotherapy, hormonal therapy, immunotherapy and anti-tumor agents). Generally, administration of products of a species origin or species reactivity (in the case of antibodies) that is the same species as that of the patient is preferred. Thus, in a preferred embodiment, human antibodies, fragments derivatives, analogs, or nucleic acids, are administered to a human patient for therapy or prophylaxis.

[0357] It is preferred to use high affinity and/or potent in vivo inhibiting and/or neutralizing antibodies against polypeptides or polynucleotides of the present invention, fragments or regions thereof, for both immunoassays directed to and therapy of allergic and/or asthmatic diseases or disorders related to polynucleotides or polypeptides, including fragments thereof, of the present invention. Such antibodies, fragments, or regions, will preferably have an affinity for polynucleotides or polypeptides of the invention, including fragments thereof. Preferred binding affinities include those with a dissociation constant or Kd less than 5×10⁻² M, 10⁻² M, 5×10⁻³ M, 10⁻³ M, 5×10⁻⁴ M, 10⁻⁴ M, 5×10⁻⁵ M, 10⁻⁵ M, 5×10⁻⁶ M, 10⁻⁶ M, 5×10⁻⁷ M, 10⁻⁷ M, 5×10⁻⁸ M, 10⁻⁸ M, 5×10⁻⁹ M, 10⁻⁹ M, 5×10⁻¹⁰ M, 10⁻¹⁰ M, 5×10⁻¹¹ M, 10⁻¹¹ M, 5×10⁻¹² M, 10⁻¹² M, 5×10⁻¹³ M, 10⁻¹³ M, 5×10⁻¹⁴ M, 10⁻¹⁴ M, 5×10⁻¹⁵ M, and 10⁻¹⁵ M.

Gene Therapy

[0358] In a specific embodiment, nucleic acids comprising sequences encoding antibodies or functional derivatives thereof, are administered to treat, inhibit or prevent an allergic and/or asthmatic disease or disorder associated with aberrant expression and/or activity of a polypeptide of the invention, by way of gene therapy. Gene therapy refers to therapy performed by the administration to a subject of an expressed or expressible nucleic acid. In this embodiment of the invention, the nucleic acids produce their encoded protein that mediates a therapeutic effect.

[0359] Any of the methods for gene therapy available in the art can be used according to the present invention. Exemplary methods are described below.

[0360] For general reviews of the methods of gene therapy, see Goldspiel et al., Clinical Pharmacy 12:488-505 (1993); Wu and Wu, Biotherapy 3:87-95 (1991); Tolstoshev, Ann. Rev. Pharmacol. Toxicol. 32:573-596 (1993); Mulligan, Science 260:926-932 (1993); and Morgan and Anderson, Ann. Rev. Biochem. 62:191-217 (1993); May, TIBTECH 11(5):155-215 (1993). Methods commonly known in the art of recombinant DNA technology which can be used are described in Ausubel et al. (eds.), Current Protocols in Molecular Biology, John Wiley & Sons, NY (1993); and Kriegler, Gene Transfer and Expression, A Laboratory Manual, Stockton Press, NY (1990).

[0361] In a preferred embodiment, the compound comprises nucleic acid sequences encoding an antibody, said nucleic acid sequences being part of expression vectors that express the antibody or fragments or chimeric proteins or heavy or light chains thereof in a suitable host. In particular, such nucleic acid sequences have promoters operably linked to the antibody coding region, said promoter being inducible or constitutive, and, optionally, tissue-specific. In another particular embodiment, nucleic acid molecules are used in which the antibody coding sequences and any other desired sequences are flanked by regions that promote homologous recombination at a desired site in the genome, thus providing for intrachromosomal expression of the antibody encoding nucleic acids (Koller and Smithies, Proc. Natl. Acad. Sci. USA 86:8932-8935 (1989); Zijlstra et al., Nature 342:435-438 (1989). In specific embodiments, the expressed antibody molecule is a single chain antibody; alternatively, the nucleic acid sequences include sequences encoding both the heavy and light chains, or fragments thereof, of the antibody.

[0362] Delivery of the nucleic acids into a patient may be either direct, in which case the patient is directly exposed to the nucleic acid or nucleic acid-carrying vectors, or indirect, in which case, cells are first transformed with the nucleic acids in vitro, then transplanted into the patient. These two approaches are known, respectively, as in vivo or ex vivo gene therapy.

[0363] In a specific embodiment, the nucleic acid sequences are directly administered in vivo, where it is expressed to produce the encoded product. This can be accomplished by any of numerous methods known in the art, e.g., by constructing them as part of an appropriate nucleic acid expression vector and administering it so that they become intracellular, e.g., by infection using defective or attenuated retrovirals or other viral vectors (see U.S. Pat. No. 4,980,286), or by direct injection of naked DNA, or by use of microparticle bombardment (e.g., a gene gun; Biolistic, Dupont), or coating with lipids or cell-surface receptors or transfecting agents, encapsulation in liposomes, microparticles, or microcapsules, or by administering them in linkage to a peptide which is known to enter the nucleus, by administering it in linkage to a ligand subject to receptor-mediated endocytosis (see, e.g., Wu and Wu, J. Biol. Chem. 262:4429-4432 (1987)) (which can be used to target cell types specifically expressing the receptors), etc. In another embodiment, nucleic acid-ligand complexes can be formed in which the ligand comprises a fusogenic viral peptide to disrupt endosomes, allowing the nucleic acid to avoid lysosomal degradation. In yet another embodiment, the nucleic acid can be targeted in vivo for cell specific uptake and expression, by targeting a specific receptor (see, e.g., PCT Publications WO 92/06180; WO 92/22635; WO92/20316; WO93/14188, WO 93/20221). Alternatively, the nucleic acid can be introduced intracellularly and incorporated within host cell DNA for expression, by homologous recombination (Koller and Smithies, Proc. Natl. Acad. Sci. USA 86:8932-8935 (1989); Zijlstra et al., Nature 342:435438 (1989)).

[0364] In a specific embodiment, viral vectors that contain nucleic acid sequences encoding an antibody of the invention are used. For example, a retroviral vector can be used (see Miller et al., Meth. Enzymol. 217:581-599 (1993)). These retroviral vectors contain the components necessary for the correct packaging of the viral genome and integration into the host cell DNA. The nucleic acid sequences encoding the antibody to be used in gene therapy are cloned into one or more vectors, which facilitate delivery of the gene into a patient. More detail about retroviral vectors can be found in Boesen et al., Biotherapy 6:291-302 (1994), which describes the use of a retroviral vector to deliver the mdr1 gene to hematopoietic stem cells in order to make the stem cells more resistant to chemotherapy. Other references illustrating the use of retroviral vectors in gene therapy are: Clowes et al., J. Clin. Invest. 93:644-651 (1994); Kiem et al., Blood 83:1467-1473 (1994); Salmons and Gunzberg, Human Gene Therapy 4:129-141 (1993); and Grossman and Wilson, Curr. Opin. in Genetics and Devel. 3:110-114 (1993).

[0365] Adenoviruses are other viral vectors that can be used in gene therapy. Adenoviruses are especially attractive vehicles for delivering genes to respiratory epithelia Adenoviruses naturally infect respiratory epithelia where they cause a mild disease. Other targets for adenovirus-based delivery systems are liver, the central nervous system, endothelial cells, and muscle. Adenoviruses have the advantage of being capable of infecting non-dividing cells. Kozarsky and Wilson, Current Opinion in Genetics and Development 3:499-503 (1993) present a review of adenovirus-based gene therapy. Bout et al., Human Gene Therapy 5:3-10 (1994) demonstrated the use of adenovirus vectors to transfer genes to the respiratory epithelia of rhesus monkeys. Other instances of the use of adenoviruses in gene therapy can be found in Rosenfeld et al., Science 252:431-434 (1991); Rosenfeld et al., Cell 68:143-155 (1992); Mastrangeli et al., J. Clin. Invest. 91:225-234 (1993); PCT Publication WO94/12649; and Wang, et al., Gene Therapy 2:775-783 (1995). In a preferred embodiment, adenovirus vectors are used.

[0366] Adeno-associated virus (AAV) has also been proposed for use in gene therapy (Walsh et al., Proc. Soc. Exp. Biol. Med. 204:289-300 (1993); U.S. Pat. No. 5,436,146).

[0367] Another approach to gene therapy involves transferring a gene to cells in tissue culture by such methods as electroporation, lipofection, calcium phosphate mediated transfection, or viral infection. Usually, the method of transfer includes the transfer of a selectable marker to the cells. The cells are then placed under selection to isolate those cells that have taken up and are expressing the transferred gene. Those cells are then delivered to a patient.

[0368] In this embodiment, the nucleic acid is introduced into a cell prior to administration in vivo of the resulting recombinant cell. Such introduction can be carried out by any method known in the art, including but not limited to transfection, electroporation, microinjection, infection with a viral or bacteriophage vector containing the nucleic acid sequences, cell fusion, chromosome-mediated gene transfer, microcell-mediated gene transfer, spheroplast fusion, etc. Numerous techniques are known in the art for the introduction of foreign genes into cells (see, e.g., Loeffler and Behr, Meth. Enzymol. 217:599-618 (1993); Cohen et al., Meth. Enzymol. 217:618-644 (1993); Cline, Pharmac. Ther. 29:69-92m (1985) and may be used in accordance with the present invention, provided that the necessary developmental and physiological functions of the recipient cells are not disrupted. The technique should provide for the stable transfer of the nucleic acid to the cell, so that the nucleic acid is expressible by the cell and preferably heritable and expressible by its cell progeny.

[0369] The resulting recombinant cells can be delivered to a patient by various methods known in the art. Recombinant blood cells (e.g., hematopoietic stem or progenitor cells) are preferably administered intravenously. The amount of cells envisioned for use depends on the desired effect, patient state, etc., and can be determined by one skilled in the art.

[0370] Cells into which a nucleic acid can be introduced for purposes of gene therapy encompass any desired, available cell type, and include but are not limited to epithelial cells, endothelial cells, keratinocytes, fibroblasts, muscle cells, hepatocytes; blood cells such as T lymphocytes, B lymphocytes, monocytes, macrophages, neutrophils, eosinophils, megakaryocytes, granulocytes; various stem or progenitor cells, in particular hematopoietic stem or progenitor cells, e.g., as obtained from bone marrow, umbilical cord blood, peripheral blood, fetal liver, etc.

[0371] In a preferred embodiment, the cell used for gene therapy is autologous to the patient.

[0372] In an embodiment in which recombinant cells are used in gene therapy, nucleic acid sequences encoding an antibody are introduced into the cells such that they are expressible by the cells or their progeny, and the recombinant cells are then administered in vivo for therapeutic effect. In a specific embodiment, stem or progenitor cells are used. Any stem and/or progenitor cells which can be isolated and maintained in vitro can potentially be used in accordance with this embodiment of the present invention (see e.g. PCT Publication WO 94/08598; Stemple and Anderson, Cell 71:973-985 (1992); Rheinwald, Meth. Cell Bio. 21A:229 (1980); and Pittelkow and Scott, Mayo Clinic Proc. 61:771 (1986)).

[0373] In a specific embodiment, the nucleic acid to be introduced for purposes of gene therapy comprises an inducible promoter operably linked to the coding region, such that expression of the nucleic acid is controllable by the presence or absence of an appropriate inducer of transcription.

Demonstration of Therapeutic or Prophylactic Activity

[0374] The compounds or pharmaceutical compositions of the invention are preferably tested in vitro, and then in vivo for the desired therapeutic or prophylactic activity, prior to use in humans. For example, in vitro assays to demonstrate the therapeutic or prophylactic utility of a compound or pharmaceutical composition include, the effect of a compound on a cell line or a patient tissue sample. The effect of the compound or composition on the cell line and/or tissue sample can be determined utilizing techniques known to those of skill in the art including, but not limited to, rosette formation assays and cell lysis assays. In accordance with the invention, in vitro assays which can be used to determine whether administration of a specific compound is indicated, include in vitro cell culture assays in which a patient tissue sample is grown in culture, and exposed to or otherwise administered a compound, and the effect of such compound upon the tissue sample is observed.

Therapeutic/Prophylactic Administration and Composition

[0375] The invention provides methods of treatment, inhibition and prophylaxis by administration to a subject of an effective amount of a compound or pharmaceutical composition of the invention, preferably a polypeptide or antibody of the invention. In a preferred embodiment, the compound is substantially purified (e.g., substantially free from substances that limit its effect or produce undesired side-effects). The subject is preferably an animal, including but not limited to animals such as cows, pigs, horses, chickens, cats, dogs, etc., and is preferably a mammal, and most preferably human.

[0376] Formulations and methods of administration that can be employed when the compound comprises a nucleic acid or an immunoglobulin are described above; additional appropriate formulations and routes of administration can be selected from among those described herein below.

[0377] Various delivery systems are known and can be used to administer a compound of the invention, e.g., encapsulation in liposomes, microparticles, microcapsules, recombinant cells capable of expressing the compound, receptor-mediated endocytosis (see, e.g., Wu and Wu, J. Biol. Chem. 262:4429-4432 (1987)), construction of a nucleic acid as part of a retroviral or other vector, etc. Methods of introduction include but are not limited to intradermal, intramuscular, intraperitoneal, intravenous, subcutaneous, intranasal, epidural, and oral routes. The compounds or compositions may be administered by any convenient route, for example by infusion or bolus injection, by absorption through epithelial or mucocutaneous linings (e.g., oral mucosa, rectal and intestinal mucosa, etc.) and may be administered together with other biologically active agents. Administration can be systemic or local. In addition, it may be desirable to introduce the pharmaceutical compounds or compositions of the invention into the central nervous system by any suitable route, including intraventricular and intrathecal injection; intraventricular injection may be facilitated by an intraventricular catheter, for example, attached to a reservoir, such as an Ommaya reservoir. Pulmonary administration can also be employed, e.g., by use of an inhaler or nebulizer, and formulation with an aerosolizing agent.

[0378] In a specific embodiment, it may be desirable to administer the pharmaceutical compounds or compositions of the invention locally to the area in need of treatment; this may be achieved by, for example, and not by way of limitation, local infusion during surgery, topical application, e.g., in conjunction with a wound dressing after surgery, by injection, by means of a catheter, by means of a suppository, or by means of an implant, said implant being of a porous, non-porous, or gelatinous material, including membranes, such as sialastic membranes, or fibers. Preferably, when administering a protein, including an antibody, of the invention, care must be taken to use materials to which the protein does not absorb.

[0379] In another embodiment, the compound or composition can be delivered in a vesicle, in particular a liposome (see Langer, Science 249:1527-1533 (1990); Treat et al., in Liposomes in the Therapy of Infectious Disease and Cancer, Lopez-Berestein and Fidler (eds.), Liss, New York, pp. 353-365 (1989); Lopez-Berestein, ibid., pp. 317-327; see generally ibid.)

[0380] In yet another embodiment, the compound or composition can be delivered in a controlled release system. In one embodiment, a pump may be used (see Langer, supra; Sefton, CRC Crit. Ref. Biomed. Eng. 14:201 (1987); Buchwald et al., Surgery 88:507 (1980); Saudek et al., N. Engl. J. Med. 321:574 (1989)). In another embodiment, polymeric materials can be used (see Medical Applications of Controlled Release, Langer and Wise (eds.), CRC Pres., Boca Raton, Fla. (1974); Controlled Drug Bioavailability, Drug Product Design and Performance, Smolen and Ball (eds.), Wiley, New York (1984); Ranger and Peppas, J., Macromol. Sci. Rev. Macromol. Chem. 23:61 (1983); see also Levy et al., Science 228:190 (1985); During et al., Ann. Neurol. 25:351 (1989); Howard et al., J. Neurosurg. 71:105 (1989)). In yet another embodiment, a controlled release system can be placed in proximity of the therapeutic target, e.g., the brain, thus requiring only a fraction of the systemic dose (see, e.g., Goodson, in Medical Applications of Controlled Release, supra, vol. 2, pp. 115-138 (1984)).

[0381] Other controlled release systems are discussed in the review by Langer (Science 249:1527-1533 (1990)).

[0382] In a specific embodiment where the compound of the invention is a nucleic acid encoding a protein, the nucleic acid can be administered in vivo to promote expression of its encoded protein, by constructing it as part of an appropriate nucleic acid expression vector and administering it so that it becomes intracellular, e.g., by use of a retroviral vector (see U.S. Pat. No. 4,980,286), or by direct injection, or by use of microparticle bombardment (e.g., a gene gun; Biolistic, Dupont), or coating with lipids or cell-surface receptors or transfecting agents, or by administering it in linkage to a homeobox-like peptide which is known to enter the nucleus (see e.g., Joliot et al., Proc. Natl. Acad. Sci. USA 88:1864-1868 (1991)), etc. Alternatively, a nucleic acid can be introduced intracellularly and incorporated within host cell DNA for expression, by homologous recombination.

[0383] The present invention also provides pharmaceutical compositions. Such compositions comprise a therapeutically effective amount of a compound, and a pharmaceutically acceptable carrier. In a specific embodiment, the term “pharmaceutically acceptable” means approved by a regulatory agency of the Federal or a state government or listed in the U.S. Pharmacopeia or other generally recognized pharmacopeia for use in animals, and more particularly in humans. The term “carrier” refers to a diluent, adjuvant, excipient, or vehicle with which the therapeutic is administered. Such pharmaceutical carriers can be sterile liquids, such as water and oils, including those of petroleum, animal, vegetable or synthetic origin, such as peanut oil, soybean oil, mineral oil, sesame oil and the like. Water is a preferred carrier when the pharmaceutical composition is administered intravenously. Saline solutions and aqueous dextrose and glycerol solutions can also be employed as liquid carriers, particularly for injectable solutions. Suitable pharmaceutical excipients include starch, glucose, lactose, sucrose, gelatin, malt, rice, flour, chalk, silica gel, sodium stearate, glycerol monostearate, talc, sodium chloride, dried skim milk, glycerol, propylene, glycol, water, ethanol and the like. The composition, if desired, can also contain minor amounts of wetting or emulsifying agents, or pH buffering agents. These compositions can take the form of solutions, suspensions, emulsion, tablets, pills, capsules, powders, sustained-release formulations and the like. The composition can be formulated as a suppository, with traditional binders and carriers such as triglycerides. Oral formulation can include standard carriers such as pharmaceutical grades of mannitol, lactose, starch, magnesium stearate, sodium saccharine, cellulose, magnesium carbonate, etc. Examples of suitable pharmaceutical carriers are described in “Remington's Pharmaceutical Sciences” by E.W. Martin. Such compositions will contain a therapeutically effective amount of the compound, preferably in purified form, together with a suitable amount of carrier so as to provide the form for proper administration to the patient. The formulation should suit the mode of administration.

[0384] In a preferred embodiment, the composition is formulated in accordance with routine procedures as a pharmaceutical composition adapted for intravenous administration to human beings. Typically, compositions for intravenous administration are solutions in sterile isotonic aqueous buffer. Where necessary, the composition may also include a solubilizing agent and a local anesthetic such as lignocaine to ease pain at the site of the injection. Generally, the ingredients are supplied either separately or mixed together in unit dosage form, for example, as a dry lyophilized powder or water free concentrate in a hermetically sealed container such as an ampoule or sachette indicating the quantity of active agent. Where the composition is to be administered by infusion, it can be dispensed with an infusion bottle containing sterile pharmaceutical grade water or saline. Where the composition is administered by injection, an ampoule of sterile water for injection or saline can be provided so that the ingredients may be mixed prior to administration.

[0385] The compounds of the invention can be formulated as neutral or salt forms. Pharmaceutically acceptable salts include those formed with anions such as those derived from hydrochloric, phosphoric, acetic, oxalic, tartaric acids, etc., and those formed with cations such as those derived from sodium, potassium, ammonium, calcium, ferric hydroxides, isopropylamine, triethylamine, 2-ethylamino ethanol, histidine, procaine, etc.

[0386] The amount of the compound of the invention which will be effective in the treatment, inhibition and prevention of a disease or disorder associated with aberrant expression and/or activity of a polypeptide of the invention can be determined by standard clinical techniques. In addition, in vitro assays may optionally be employed to help identify optimal dosage ranges. The precise dose to be employed in the formulation will also depend on the route of administration, and the seriousness of the disease or disorder, and should be decided according to the judgment of the practitioner and each patient's circumstances. Effective doses may be extrapolated from dose-response curves derived from in vitro or animal model test systems.

[0387] For antibodies, the dosage administered to a patient is typically 0.1 mg/kg to 100 mg/kg of the patient's body weight. Preferably, the dosage administered to a patient is between 0.1 mg/kg and 20 mg/kg of the patient's body weight, more preferably 1 mg/kg to 10 mg/kg of the patient's body weight. Generally, human antibodies have a longer half-life within the human body than antibodies from other species due to the immune response to the foreign polypeptides. Thus, lower dosages of human antibodies and less frequent administration is often possible. Further, the dosage and frequency of administration of antibodies of the invention may be reduced by enhancing uptake and tissue penetration (e.g., into the brain) of the antibodies by modifications such as, for example, lipidation.

[0388] The invention also provides a pharmaceutical pack or kit comprising one or more containers filled with one or more of the ingredients of the pharmaceutical compositions of the invention. Optionally associated with such container(s) can be a notice in the form prescribed by a governmental agency regulating the manufacture, use or sale of pharmaceuticals or biological products, which notice reflects approval by the agency of manufacture, use or sale for human administration.

Diagnosis and Imaging

[0389] Labeled antibodies, and derivatives and analogs thereof, which specifically bind to a polypeptide of interest can be used for diagnostic purposes to detect, diagnose, prognosticate, or monitor allergic and/or asthmatic diseases, disorders, and/or conditions associated with the aberrant expression and/or activity of a polypeptide of the invention. The invention provides for the detection of aberrant expression of a polypeptide of interest, comprising (a) assaying the expression of the polypeptide of interest in cells or body fluid of an individual using one or more antibodies specific to the polypeptide interest and (b) comparing the level of gene expression with a standard gene expression level, whereby an increase or decrease in the assayed polypeptide gene expression level compared to the standard expression level is indicative of aberrant expression.

[0390] The invention provides a diagnostic assay for diagnosing an allergic and/or asthmatic disease or disorder, comprising (a) assaying the expression of the polypeptide of interest in cells or body fluid of an individual using one or more antibodies specific to the polypeptide interest and (b) comparing the level of gene expression with a standard gene expression level, whereby an increase or decrease in the assayed polypeptide gene expression level compared to the standard expression level is indicative of a particular allergic and/or asthmatic disease or disorder. With respect to an allergic and/or asthmatic disease or disorder, the presence of a relatively high amount of transcript in biopsied tissue from an individual may indicate a predisposition for the development of the disease, or may provide a means for detecting the disease prior to the appearance of actual clinical symptoms. A more definitive diagnosis of this type may allow health professionals to employ preventative measures or aggressive treatment earlier thereby preventing the development or further progression of the allergic and/or asthmatic disease or disorder.

[0391] Antibodies of the invention can be used to assay protein levels in a biological sample using classical immunohistological methods known to those of skill in the art (e.g., see Jalkanen et al., J. Cell. Biol. 101:976-985 (1985); Jalkanen et al., J. Cell. Biol. 105:3087-3096 (1987)). Other antibody-based methods useful for detecting protein gene expression include immunoassays, such as the enzyme linked immunosorbent assay (ELISA) and the radioimmunoassay (RIA). Suitable antibody assay labels are known in the art and include enzyme labels, such as, glucose oxidase; radioisotopes, such as iodine (125I, 121I), carbon (14C), sulfur (35S), tritium (3H), indium (112In), and technetium (99Tc); luminescent labels, such as luminol; and fluorescent labels, such as fluorescein and rhodamine, and biotin.

[0392] One facet of the invention is the detection and diagnosis of a disease or disorder associated with aberrant expression of a polypeptide of interest in an animal, preferably a mammal and most preferably a human. In one embodiment, diagnosis comprises: a) administering (for example, parenterally, subcutaneously, or intraperitoneally) to a subject an effective amount of a labeled molecule which specifically binds to the polypeptide of interest; b) waiting for a time interval following the administering for permitting the labeled molecule to preferentially concentrate at sites in the subject where the polypeptide is expressed (and for unbound labeled molecule to be cleared to background level); c) determining background level; and d) detecting the labeled molecule in the subject, such that detection of labeled molecule above the background level indicates that the subject has a particular disease or disorder associated with aberrant expression of the polypeptide of interest. Background level can be determined by various methods including, comparing the amount of labeled molecule detected to a standard value previously determined for a particular system.

[0393] It will be understood in the art that the size of the subject and the imaging system used will determine the quantity of imaging moiety needed to produce diagnostic images. In the case of a radioisotope moiety, for a human subject, the quantity of radioactivity injected will normally range from about 5 to 20 millicuries of 99mTc. The labeled antibody or antibody fragment will then preferentially accumulate at the location of cells that contain the specific protein. In vivo tumor imaging is described in S. W. Burchiel et al., “Immunopharmacokinetics of Radiolabeled Antibodies and Their Fragments.” (Chapter 13 in Tumor Imaging: The Radiochemical Detection of Cancer, S. W. Burchiel and B. A. Rhodes, eds., Masson Publishing Inc. (1982)).

[0394] Depending on several variables, including the type of label used and the mode of administration, the time interval following the administration for permitting the labeled molecule to preferentially concentrate at sites in the subject and for unbound labeled molecule to be cleared to background level is 6 to 48 hours or 6 to 24 hours or 6 to 12 hours. In another embodiment the time interval following administration is 5 to 20 days or 5 to 10 days.

[0395] In an embodiment, monitoring of the disease or disorder is carried out by repeating the method for diagnosing the disease or disease, for example, one month after initial diagnosis, six months after initial diagnosis, one year after initial diagnosis, etc.

[0396] Presence of the labeled molecule can be detected in the patient using methods known in the art for in vivo scanning. These methods depend upon the type of label used. Skilled artisans will be able to determine the appropriate method for detecting a particular label. Methods and devices that may be used in the diagnostic methods of the invention include, but are not limited to, computed tomography (CT), whole body scan such as position emission tomography (PET), magnetic resonance imaging (MRI), and sonography.

[0397] In a specific embodiment, the molecule is labeled with a radioisotope and is detected in the patient using a radiation responsive surgical instrument (Thurston et al., U.S. Pat. No. 5,441,050). In another embodiment, the molecule is labeled with a fluorescent compound and is detected in the patient using a fluorescence responsive scanning instrument. In another embodiment, the molecule is labeled with a positron emitting metal and is detected in the patent using positron emission-tomography. In yet another embodiment, the molecule is labeled with a paramagnetic label and is detected in a patient using magnetic resonance imaging (MRI).

Kits

[0398] The present invention provides kits that can be used in the above methods. In one embodiment, a kit comprises an antibody of the invention, preferably a purified antibody, in one or more containers. In a specific embodiment, the kits of the present invention contain a substantially isolated polypeptide comprising an epitope that is specifically immunoreactive with an antibody included in the kit. Preferably, the kits of the present invention further comprise a control antibody that does not react with the polypeptide of interest. In another specific embodiment, the kits of the present invention contain a means for detecting the binding of an antibody to a polypeptide of interest (e.g., the antibody may be conjugated to a detectable substrate such as a fluorescent compound, an enzymatic substrate, a radioactive compound or a luminescent compound, or a second antibody which recognizes the first antibody may be conjugated to a detectable substrate).

[0399] In another specific embodiment of the present invention, the kit is a diagnostic kit for use in screening serum containing antibodies specific against proliferative and/or cancerous polynucleotides and polypeptides. Such a kit may include a control antibody that does not react with the polypeptide of interest. Such a kit may include a substantially isolated polypeptide antigen comprising an epitope that is specifically immunoreactive with at least one anti-polypeptide antigen antibody. Further, such a kit includes means for detecting the binding of said antibody to the antigen (e.g., the antibody may be conjugated to a fluorescent compound such as fluorescein or rhodamine which can be detected by flow cytometry). In specific embodiments, the kit may include a recombinantly produced or chemically synthesized polypeptide antigen. The polypeptide antigen of the kit may also be attached to a solid support.

[0400] In a more specific embodiment the detecting means of the above-described kit includes a solid support to which said polypeptide antigen is attached. Such a kit may also include a non-attached reporter-labeled anti-human antibody. In this embodiment, binding of the antibody to the polypeptide antigen can be detected by binding of the said reporter-labeled antibody.

[0401] In an additional embodiment, the invention includes a diagnostic kit for use in screening serum containing antigens of the polypeptide of the invention. The diagnostic kit includes a substantially isolated antibody specifically immunoreactive with polypeptide or polynucleotide antigens, and means for detecting the binding of the polynucleotide or polypeptide antigen to the antibody. In one embodiment, the antibody is attached to a solid support. In a specific embodiment, the antibody may be a monoclonal antibody. The detecting means of the kit may include a second, labeled monoclonal antibody. Alternatively, or in addition, the detecting means may include a labeled, competing antigen.

[0402] In one diagnostic configuration, test serum is reacted with a solid phase reagent having a surface-bound antigen obtained by the methods of the present invention. After binding with specific antigen antibody to the reagent and removing unbound serum components by washing, the reagent is reacted with reporter-labeled anti-human antibody to bind reporter to the reagent in proportion to the amount of bound anti-antigen antibody on the solid support. The reagent is again washed to remove unbound labeled antibody, and the amount of reporter associated with the reagent is determined. Typically, the reporter is an enzyme that is detected by incubating the solid phase in the presence of a suitable fluorometric, luminescent or calorimetric substrate (SIGMA™, St. Louis, Mo.).

[0403] The solid surface reagent in the above assay is prepared by known techniques for attaching protein material to solid support material, such as polymeric beads, dip sticks, 96-well plate or filter material. These attachment methods generally include non-specific adsorption of the protein to the support or covalent attachment of the protein, typically through a free amine group, to a chemically reactive group on the solid support, such as an activated carboxyl, hydroxyl, or aldehyde group. Alternatively, streptavidin coated plates can be used in conjunction with biotinylated antigen(s).

[0404] Thus, the invention provides an assay system or kit for carrying out this diagnostic method. The kit generally includes a support with surface-bound recombinant antigens, and a reporter-labeled anti-human antibody for detecting surface-bound anti-antigen antibody.

Uses of the Polynucleotides

[0405] Each of the polynucleotides identified herein can be used in numerous ways as reagents. The following description should be considered exemplary and utilizes known techniques.

[0406] The polynucleotides of the present invention are useful for chromosome identification. There exists an ongoing need to identify new chromosome markers, since few chromosome marking reagents, based on actual sequence data (repeat polymorphisms), are presently available. Each sequence is specifically targeted to and can hybridize with a particular location on an individual human chromosome, thus each polynucleotide of the present invention can routinely be used as a chromosome marker using techniques known in the art. Table 1B.1, column 8 provides the chromosome location of some of the polynucleotides of the invention.

[0407] Briefly, sequences can be mapped to chromosomes by preparing PCR primers (preferably at least 15 bp (e.g., 15-25 bp) from the sequences shown in SEQ ID NO:X. Primers can optionally be selected using computer analysis so that primers do not span more than one predicted exon in the genomic DNA. These primers are then used for PCR screening of somatic cell hybrids containing individual human chromosomes. Only those hybrids containing the human gene corresponding to SEQ ID NO:X will yield an amplified fragment.

[0408] Similarly, somatic hybrids provide a rapid method of PCR mapping the polynucleotides to particular chromosomes. Three or more clones can be assigned per day using a single thermal cycler. Moreover, sublocalization of the polynucleotides can be achieved with panels of specific chromosome fragments. Other gene mapping strategies that can be used include in situ hybridization, prescreening with labeled flow-sorted chromosomes, preselection by hybridization to construct chromosome specific-cDNA libraries, and computer mapping techniques (See, e.g., Shuler, Trends Biotechnol 16:456-459 (1998) which is hereby incorporated by reference in its entirety).

[0409] Precise chromosomal location of the polynucleotides can also be achieved using fluorescence in situ hybridization (FISH) of a metaphase chromosomal spread. This technique uses polynucleotides as short as 500 or 600 bases; however, polynucleotides 2,000-4,000 bp are preferred. For a review of this technique, see Verma et al., “Human Chromosomes: a Manual of Basic Techniques,” Pergamon Press, New York (1988).

[0410] For chromosome mapping, the polynucleotides can be used individually (to mark a single chromosome or a single site on that chromosome) or in panels (for marking multiple sites and/or multiple chromosomes).

[0411] Thus, the present invention also provides a method for chromosomal localization which involves (a) preparing PCR primers from the polynucleotide sequences in Table 1B and/or Table 2 and SEQ ID NO:X and (b) screening somatic cell hybrids containing individual chromosomes.

[0412] The polynucleotides of the present invention would likewise be useful for radiation hybrid mapping, HAPPY mapping, and long range restriction mapping. For a review of these techniques and others known in the art, see, e.g. Dear, “Genome Mapping: A Practical Approach,” IRL Press at Oxford University Press, London (1997); Aydin, J. Mol. Med. 77:691-694 (1999); Hacia et al., Mol. Psychiatry 3:483-492 (1988); Herrick et al., Chromosome Res. 7:409-423 (1999); Hamilton et al., Methods Cell Biol. 62:265-280 (2000); and/or Ott, J. Hered. 90:68-70(1999) each of which is hereby incorporated by reference in its entirety.

[0413] Once a polynucleotide has been mapped to a precise chromosomal location, the physical position of the polynucleotide can be used in linkage analysis. Linkage analysis establishes coinheritance between a chromosomal location and presentation of a particular disease. (Disease mapping data are found, for example, in V. McKusick, Mendelian Inheritance in Man (available on line through Johns Hopkins University Welch Medical Library)). Column 9 of Table 1B.1 provides an OMIM reference identification number of diseases associated with the cytologic band disclosed in column 8 of Table 1B.1, as determined using techniques described herein and by reference to Table 5. Assuming 1 megabase mapping resolution and one gene per 20 kb, a cDNA precisely localized to a chromosomal region associated with the disease could be one of 50-500 potential causative genes.

[0414] Thus, once coinheritance is established, differences in a polynucleotide of the invention and the corresponding gene between affected and unaffected individuals can be examined. First, visible structural alterations in the chromosomes, such as deletions or translocations, are examined in chromosome spreads or by PCR. If no structural alterations exist, the presence of point mutations are ascertained. Mutations observed in some or all affected individuals, but not in normal individuals, indicates that the mutation may cause the disease. However, complete sequencing of the polypeptide and the corresponding gene from several normal individuals is required to distinguish the mutation from a polymorphism. If a new polymorphism is identified, this polymorphic polypeptide can be used for further linkage analysis.

[0415] Furthermore, increased or decreased expression of the gene in affected individuals as compared to unaffected individuals can be assessed using the polynucleotides of the invention. Any of these alterations (altered expression, chromosomal rearrangement, or mutation) can be used as a diagnostic or prognostic marker. Diagnostic and prognostic methods, kits and reagents encompassed by the present invention are briefly described below and more thoroughly elsewhere herein (see e.g., the sections labeled “Antibodies”, “Diagnostic Assays”, and “Methods for Detecting Diseases”).

[0416] Thus, the invention also provides a diagnostic method useful during diagnosis of a disorder, involving measuring the expression level of polynucleotides of the present invention in cells or body fluid from an individual and comparing the measured gene expression level with a standard level of polynucleotide expression level, whereby an increase or decrease in the gene expression level compared to the standard is indicative of a disorder. Additional non-limiting examples of diagnostic methods encompassed by the present invention are more thoroughly described elsewhere herein (see, e.g., Example 12).

[0417] In still another embodiment, the invention includes a kit for analyzing samples for the presence of proliferative and/or cancerous polynucleotides derived from a test subject. In a general embodiment, the kit includes at least one polynucleotide probe containing a nucleotide sequence that will specifically hybridize with a polynucleotide of the invention and a suitable container. In a specific embodiment, the kit includes two polynucleotide probes defining an internal region of the polynucleotide of the invention, where each probe has one strand containing a 31′mer-end internal to the region. In a further embodiment, the probes may be useful as primers for polymerase chain reaction amplification.

[0418] Where a diagnosis of a related disorder, including, for example, diagnosis of a tumor, has already been made according to conventional methods, the present invention is useful as a prognostic indicator, whereby patients exhibiting enhanced or depressed polynucleotide of the invention expression will experience a worse clinical outcome relative to patients expressing the gene at a level nearer the standard level.

[0419] By “measuring the expression level of polynucleotides of the invention” is intended qualitatively or quantitatively measuring or estimating the level of the polypeptide of the invention or the level of the mRNA encoding the polypeptide of the invention in a first biological sample either directly (e.g., by determining or estimating absolute protein level or mRNA level) or relatively (e.g., by comparing to the polypeptide level or mRNA level in a second biological sample). Preferably, the polypeptide level or mRNA level in the first biological sample is measured or estimated and compared to a standard polypeptide level or mRNA level, the standard being taken from a second biological sample obtained from an individual not having the related disorder or being determined by averaging levels from a population of individuals not having a related disorder. As will be appreciated in the art, once a standard polypeptide level or mRNA level is known, it can be used repeatedly as a standard for comparison.

[0420] By “biological sample” is intended any biological sample obtained from an individual, body fluid, cell line, tissue culture, or other source that contains polypeptide of the present invention or the corresponding mRNA. As indicated, biological samples include body fluids (such as semen, lymph, vaginal pool, sera, plasma, urine, synovial fluid and spinal fluid) that contain the polypeptide of the present invention, and tissue sources found to express the polypeptide of the present invention. Methods for obtaining tissue biopsies and body fluids from mammals are well known in the art. Where the biological sample is to include mRNA, a tissue biopsy is the preferred source.

[0421] The method(s) provided above may preferably be applied in a diagnostic method and/or kits in which polynucleotides and/or polypeptides of the invention are attached to a solid support. In one exemplary method, the support may be a “gene chip” or a “biological chip” as described in U.S. Pat. Nos. 5,837,832, 5,874,219, and 5,856,174. Further, such a gene chip with polynucleotides of the invention attached may be used to identify polymorphisms between the isolated polynucleotide sequences of the invention, with polynucleotides isolated from a test subject. The knowledge of such polymorphisms (i.e. their location, as well as, their existence) would be beneficial in identifying disease loci for many disorders, such as for example, in neural disorders, immune system disorders, muscular disorders, reproductive disorders, gastrointestinal disorders, pulmonary disorders, digestive disorders, metabolic disorders, cardiovascular disorders, renal disorders, proliferative disorders, and/or cancerous diseases and conditions. Such a method is described in U.S. Pat. Nos. 5,858,659 and 5,856,104. The US patents referenced supra are hereby incorporated by reference in their entirety herein.

[0422] The present invention encompasses polynucleotides of the present invention that are chemically synthesized, or reproduced as peptide nucleic acids (PNA), or according to other methods known in the art. The use of PNAs would serve as the preferred form if the polynucleotides of the invention are incorporated onto a solid support, or gene chip. For the purposes of the present invention, a peptide nucleic acid (PNA) is a polyamide type of DNA analog and the monomeric units for adenine, guanine, thymine and cytosine are available commercially (Perceptive Biosystems). Certain components of DNA, such as phosphorus, phosphorus oxides, or deoxyribose derivatives, are not present in PNAs. As disclosed by Nielsen et al., Science 254, 1497 (1991); and Egholm et al., Nature 365, 666 (1993), PNAs bind specifically and tightly to complementary DNA strands and are not degraded by nucleases. In fact, PNA binds more strongly to DNA than DNA itself does. This is probably because there is no electrostatic repulsion between the two strands, and also the polyamide backbone is more flexible. Because of this, PNA/DNA duplexes bind under a wider range of stringency conditions than DNA/DNA duplexes, making it easier to perform multiplex hybridization. Smaller probes can be used than with DNA due to the strong binding. In addition, it is more likely that single base mismatches can be determined with PNA/DNA hybridization because a single mismatch in a PNA/DNA 15-mer lowers the melting point (Tₘ) by 8°-20° C., vs. 4°-16° C. for the DNA/DNA 15-mer duplex. Also, the absence of charge groups in PNA means that hybridization can be done at low ionic strengths and reduce possible interference by salt during the analysis.

[0423] The compounds of the present invention have uses that include, but are not limited to, detecting cancer in mammals. In particular the invention is useful during diagnosis of pathological cell proliferative neoplasias which include, but are not limited to: acute myelogenous leukemias including acute monocytic leukemia, acute myeloblastic leukemia, acute promyelocytic leukemia, acute myelomonocytic leukemia, acute erythroleukemia, acute megakaryocytic leukemia, and acute undifferentiated leukemia, etc.; and chronic myelogenous leukemias including chronic myelomonocytic leukemia, chronic granulocytic leukemia, etc. Preferred mammals include monkeys, apes, cats, dogs, cows, pigs, horses, rabbits and humans. Particularly preferred are humans.

[0424] Pathological cell proliferative disorders are often associated with inappropriate activation of proto-oncogenes. (Gelmann, E. P. et al., “The Etiology of Acute Leukemia: Molecular Genetics and Viral Oncology,” in Neoplastic Diseases of the Blood, Vol 1., Wiemik, P. H. et al. eds., 161-182 (1985)). Neoplasias are now believed to result from the qualitative alteration of a normal cellular gene product, or from the quantitative modification of gene expression by insertion into the chromosome of a viral sequence, by chromosomal translocation of a gene to a more actively transcribed region, or by some other mechanism. (Gelmann et al., supra) It is likely that mutated or altered expression of specific genes is involved in the pathogenesis of some leukemias, among other tissues and cell types. (Gelmann et al., supra) Indeed, the human counterparts of the oncogenes involved in some animal neoplasias have been amplified or translocated in some cases of human leukemia and carcinoma (Gelmann et al., supra)

[0425] For example, c-myc expression is highly amplified in the non-lymphocytic leukemia cell line HL-60. When HL-60 cells are chemically induced to stop proliferation, the level of c-myc is found to be downregulated. (International Publication Number WO 91/15580). However, it has been shown that exposure of HL-60 cells to a DNA construct that is complementary to the 5′ end of c-myc or c-myb blocks translation of the corresponding mRNAs which downregulates expression of the c-myc or c-myb proteins and causes arrest of cell proliferation and differentiation of the treated cells. (International Publication Number WO 91/15580; Wickstrom et al., Proc. Natl. Acad. Sci. 85:1028 (1988); Anfossi et al., Proc. Natl. Acad. Sci. 86:3379 (1989)). However, the skilled artisan would appreciate the present invention's usefulness is not be limited to treatment, prevention, and/or prognosis of proliferative disorders of cells and tissues of hematopoietic origin, in light of the numerous cells and cell types of varying origins which are known to exhibit proliferative phenotypes.

[0426] In addition to the foregoing, a polynucleotide of the present invention can be used to control gene expression through triple helix formation or through antisense DNA or RNA. Antisense techniques are discussed, for example, in Okano, J. Neurochem. 56: 560 (1991); “Oligodeoxynucleotides as Antisense Inhibitors of Gene Expression, CRC Press, Boca Raton, Fla. (1988). Triple helix formation is discussed in, for instance Lee et al., Nucleic Acids Research 6: 3073 (1979); Cooney et al., Science 241: 456 (1988); and Dervan et al., Science 251: 1360 (1991). Both methods rely on binding of the polynucleotide to a complementary DNA or RNA. For these techniques, preferred polynucleotides are usually oligonucleotides 20 to 40 bases in length and complementary to either the region of the gene involved in transcription (triple helix—see Lee et al., Nucl. Acids Res. 6:3073 (1979); Cooney et al., Science 241:456 (1988); and Dervan et al., Science 251:1360 (1991)) or to the mRNA itself (antisense—Okano, J. Neurochem. 56:560 (1991); Oligodeoxy-nucleotides as Antisense Inhibitors of Gene Expression, CRC Press, Boca Raton, Fla. (1988)). Triple helix formation optimally results in a shut-off of RNA transcription from DNA, while antisense RNA hybridization blocks translation of an mRNA molecule into polypeptide. The oligonucleotide described above can also be delivered to cells such that the antisense RNA or DNA may be expressed in vivo to inhibit production of polypeptide of the present invention antigens. Both techniques are effective in model systems, and the information disclosed herein can be used to design antisense or triple helix polynucleotides in an effort to treat disease, and in particular, for the treatment of proliferative diseases and/or conditions. Non-limiting antisense and triple helix methods encompassed by the present invention are more thoroughly described elsewhere herein (see, e.g., the section labeled “Antisense and Ribozyme (Antagonists)”).

[0427] Polynucleotides of the present invention are also useful in gene therapy. One goal of gene therapy is to insert a normal gene into an organism having a defective gene, in an effort to correct the genetic defect. The polynucleotides disclosed in the present invention offer a means of targeting such genetic defects in a highly accurate manner. Another goal is to insert a new gene that was not present in the host genome, thereby producing a new trait in the host cell. Additional non-limiting examples of gene therapy methods encompassed by the present invention are more thoroughly described elsewhere herein (see, e.g., the sections labeled “Gene Therapy Methods”, and Examples 16, 17 and 18).

[0428] The polynucleotides are also useful for identifying individuals from minute biological samples. The United States military, for example, is considering the use of restriction fragment length polymorphism (RFLP) for identification of its personnel. In this technique, an individual's genomic DNA is digested with one or more restriction enzymes, and probed on a Southern blot to yield unique bands for identifying personnel. This method does not suffer from the current limitations of “Dog Tags” which can be lost, switched, or stolen, making positive identification difficult. The polynucleotides of the present invention can be used as additional DNA markers for RFLP.

[0429] The polynucleotides of the present invention can also be used as an alternative to RFLP, by determining the actual base-by-base DNA sequence of selected portions of an individual's genome. These sequences can be used to prepare PCR primers for amplifying and isolating such selected DNA, which can then be sequenced. Using this technique, individuals can be identified because each individual will have a unique set of DNA sequences. Once an unique ID database is established for an individual, positive identification of that individual, living or dead, can be made from extremely small tissue samples.

[0430] Forensic biology also benefits from using DNA-based identification techniques as disclosed herein. DNA sequences taken from very small biological samples such as tissues, e.g., hair or skin, or body fluids, e.g., blood, saliva, semen, synovial fluid, amniotic fluid, breast milk, lymph, pulmonary sputum or surfactant, urine, fecal matter, etc., can be amplified using PCR. In one prior art technique, gene sequences amplified from polymorphic loci, such as DQa class II HLA gene, are used in forensic biology to identify individuals. (Erlich, H., PCR Technology, Freeman and Co. (1992)). Once these specific polymorphic loci are amplified, they are digested with one or more restriction enzymes, yielding an identifying set of bands on a Southern blot probed with DNA corresponding to the DQa class II HLA gene. Similarly, polynucleotides of the present invention can be used as polymorphic markers for forensic purposes.

[0431] There is also a need for reagents capable of identifying the source of a particular tissue. Such need arises, for example, in forensics when presented with tissue of unknown origin. Appropriate reagents can comprise, for example, DNA probes or primers prepared from the sequences of the present invention, specific to tissues, including but not limited to those shown in Table 1B. Panels of such reagents can identify tissue by species and/or by organ type. In a similar fashion, these reagents can be used to screen tissue cultures for contamination. Additional non-limiting examples of such uses are further described herein.

[0432] The polynucleotides of the present invention are also useful as hybridization probes for differential identification of the tissue(s) or cell type(s) present in a biological sample. Similarly, polypeptides and antibodies directed to polypeptides of the present invention are useful to provide immunological probes for differential identification of the tissue(s) (e.g., immunohistochemistry assays) or cell type(s) (e.g., immunocytochemistry assays). In addition, for a number of disorders of the above tissues or cells, significantly higher or lower levels of gene expression of the polynucleotides/polypeptides of the present invention may be detected in certain tissues (e.g., tissues expressing polypeptides and/or polynucleotides of the present invention, for example, those disclosed in column 7 of Table 1B.1, and/or cancerous and/or wounded tissues) or bodily fluids (e.g., semen, lymph, vaginal pool, serum, plasma, urine, synovial fluid or spinal fluid) taken from an individual having such a disorder, relative to a “standard” gene expression level, i.e., the expression level in healthy tissue from an individual not having the disorder.

[0433] Thus, the invention provides a diagnostic method of a disorder, which involves: (a) assaying gene expression level in cells or body fluid of an individual; (b) comparing the gene expression level with a standard gene expression level, whereby an increase or decrease in the assayed gene expression level compared to the standard expression level is indicative of a disorder.

[0434] In the very least, the polynucleotides of the present invention can be used as molecular weight markers on Southern gels, as diagnostic probes for the presence of a specific mRNA in a particular cell type, as a probe to “subtract-out” known sequences in the process of discovering novel polynucleotides, for selecting and making oligomers for attachment to a “gene chip” or other support, to raise anti-DNA antibodies using DNA immunization techniques, and as an antigen to elicit an immune response.

Uses of the Polypeptides

[0435] Each of the polypeptides identified herein can be used in numerous ways. The following description should be considered exemplary and utilizes known techniques.

[0436] Polypeptides and antibodies directed to polypeptides of the present invention are useful to provide immunological probes for differential identification of the tissue(s) (e.g., immunohistochemistry assays such as, for example, ABC immunoperoxidase (Hsu et al., J. Histochem. Cytochem. 29:577-580 (1981)) or cell type(s) (e.g., immunocytochemistry assays).

[0437] Antibodies can be used to assay levels of polypeptides encoded by polynucleotides of the invention in a biological sample using classical immunohistological methods known to those of skill in the art (e.g., see Jalkanen, et al., J. Cell. Biol. 101:976-985 (1985); Jalkanen, et al., J. Cell. Biol. 105:3087-3096 (1987)). Other antibody-based methods useful for detecting protein gene expression include immunoassays, such as the enzyme linked immunosorbent assay (ELISA) and the radioimmunoassay (RIA). Suitable antibody assay labels are known in the art and include enzyme labels, such as, glucose oxidase; radioisotopes, such as iodine (¹³¹I, ¹²⁵I, ¹²³I, ¹²¹I), carbon (¹⁴C), sulfur (³⁵S), tritium (³H), indium (^{115m}In, ^{113m}In, ¹¹²In, ¹¹¹In), and technetium (⁹⁹Tc, ^{99m}Tc), thallium (²⁰¹Ti), gallium (⁶⁸Ga, ⁶⁷Ga), palladium (¹⁰³Pd), molybdenum (⁹⁹Mo), xenon (¹³³Xe), fluorine (¹⁸F), ¹⁵³Sm, ¹⁷⁷Lu, ¹⁵⁹Gd, ¹⁴⁹Pm, ¹⁴⁰La, ¹⁷⁵Yb, ¹⁶⁶Ho, ⁹⁰Y, ⁴⁷Sc, ¹⁸⁶Re, ¹⁸⁸Re, ¹⁴²Pr, ¹⁰⁵Rh, ⁹⁷Ru; luminescent labels, such as luminol; and fluorescent labels, such as fluorescein and rhodamine, and biotin.

[0438] In addition to assaying levels of polypeptide of the present invention in a biological sample, proteins can also be detected in vivo by imaging. Antibody labels or markers for in vivo imaging of protein include those detectable by X-radiography, NMR or ESR. For X-radiography, suitable labels include radioisotopes such as barium or cesium, which emit detectable radiation but are not overtly harmful to the subject. Suitable markers for NMR and ESR include those with a detectable characteristic spin, such as deuterium, which may be incorporated into the antibody by labeling of nutrients for the relevant hybridoma

[0439] A protein-specific antibody or antibody fragment which has been labeled with an appropriate detectable imaging moiety, such as a radioisotope (for example, ¹³¹I, ¹¹²In, ^{99m}Tc, (¹³¹I, ¹²⁵I, ¹²³I, ¹²¹I), carbon (¹⁴C), sulfur (³⁵S), tritium (³H), indium (^{115m}In, ^{113m}In, ¹¹²In, ¹¹¹In), and technetium (⁹⁹Tc, ^{99m}Tc), thallium (²⁰¹Ti), gallium (⁶⁸Ga, ⁶⁷Ga), palladium (¹⁰³Pd), molybdenum (⁹⁹Mo), xenon (¹³³Xe), fluorine (¹⁸F, ¹⁵³Sm, ¹⁷⁷Lu, ¹⁵⁹Gd, ¹⁴⁹Pm, ¹⁴⁰La, ¹⁷⁵Yb, ¹⁶⁶Ho, ⁹⁰Y, ⁴⁷Sc, ¹⁸⁶Re, ¹⁸⁸Re, ¹⁴²Pr, ¹⁰⁵Rh, ⁹⁷Ru), a radio-opaque substance, or a material detectable by nuclear magnetic resonance, is introduced (for example, parenterally, subcutaneously or intraperitoneally) into the mammal to be examined for immune system disorder. It will be understood in the art that the size of the subject and the imaging system used will determine the quantity of imaging moiety needed to produce diagnostic images. In the case of a radioisotope moiety, for a human subject, the quantity of radioactivity injected will normally range from about 5 to 20 millicuries of ^{99m}Tc. The labeled antibody or antibody fragment will then preferentially accumulate at the location of cells that express the polypeptide encoded by a polynucleotide of the invention. In vivo tumor imaging is described in S. W. Burchiel et al., “Immunopharmacokinetics of Radiolabeled Antibodies and Their Fragments” (Chapter 13 in Tumor Imaging: The Radiochemical Detection of Cancer, S. W. Burchiel and B. A. Rhodes, eds., Masson Publishing Inc. (1982)).

[0440] In one embodiment, the invention provides a method for the specific delivery of compositions of the invention to cells by administering polypeptides of the invention (e.g., polypeptides encoded by polynucleotides of the invention and/or antibodies) that are associated with heterologous polypeptides or nucleic acids. In one example, the invention provides a method for delivering a therapeutic protein into the targeted cell. In another example, the invention provides a method for delivering a single stranded nucleic acid (e.g., antisense or ribozymes) or double stranded nucleic acid (e.g., DNA that can integrate into the cell's genome or replicate episomally and that can be transcribed) into the targeted cell.

[0441] In another embodiment, the invention provides a method for the specific destruction of cells (e.g., the destruction of tumor cells) by administering polypeptides of the invention in association with toxins or cytotoxic prodrugs.

[0442] By “toxin” is meant one or more compounds that bind and activate endogenous cytotoxic effector systems, radioisotopes, holotoxins, modified toxins, catalytic subunits of toxins, or any molecules or enzymes not normally present in or on the surface of a cell that under defined conditions cause the cell's death. Toxins that may be used according to the methods of the invention include, but are not limited to, radioisotopes known in the art, compounds such as, for example, antibodies (or complement fixing containing portions thereof) that bind an inherent or induced endogenous cytotoxic effector system, thymidine kinase, endonuclease, RNAse, alpha toxin, ricin, abrin, Pseudomonas exotoxin A, diphtheria toxin, saporin, momordin, gelonin, pokeweed antiviral protein, alpha-sarcin and cholera toxin. “Toxin” also includes a cytostatic or cytocidal agent, a therapeutic agent or a radioactive metal ion, e.g., alpha-emitters such as, for example, ²¹³Bi, or other radioisotopes such as, for example, ¹⁰³Pd, ¹³³Xe, ¹³¹I, ⁶⁸Ge, ⁵⁷Co, ⁶⁵Zn, ⁸⁵Sr, ³²P, ³⁵S, ⁹⁰Y, ¹⁵³Sm, ¹⁵³Gd, ¹⁶⁹Yb, ⁵¹Cr, ⁵⁴Mn, ⁷⁵Se, ¹¹³Sn, ⁹⁰Yttrium, ¹¹⁷Tin, ¹⁸⁶Rhenium, ¹⁶⁶Holmium, and ¹⁶⁸Rhenium; luminescent labels, such as luminol; and fluorescent labels, such as fluorescein and rhodamine, and biotin. In a specific embodiment, the invention provides a method for the specific destruction of cells (e.g., the destruction of tumor cells) by administering polypeptides of the invention or antibodies of the invention in association with the radioisotope ⁹⁰Y. In another specific embodiment, the invention provides a method for the specific destruction of cells (e.g., the destruction of tumor cells) by administering polypeptides of the invention or antibodies of the invention in association with the radioisotope ¹¹¹In. In a further specific embodiment, the invention provides a method for the specific destruction of cells (e.g., the destruction of tumor cells) by administering polypeptides of the invention or antibodies of the invention in association with the radioisotope ¹³¹I.

[0443] Techniques known in the art may be applied to label polypeptides of the invention (including antibodies). Such techniques include, but are not limited to, the use of bifunctional conjugating agents (see e.g., U.S. Pat. Nos. 5,756,065; 5,714,631; 5,696,239; 5,652,361; 5,505,931; 5,489,425; 5,435,990; 5,428,139; 5,342,604; 5,274,119; 4,994,560; and 5,808,003; the contents of each of which are hereby incorporated by reference in its entirety).

[0444] Thus, the invention provides a diagnostic method of a disorder, which involves (a) assaying the expression level of a polypeptide of the present invention in cells or body fluid of an individual; and (b) comparing the assayed polypeptide expression level with a standard polypeptide expression level, whereby an increase or decrease in the assayed polypeptide expression level compared to the standard expression level is indicative of a disorder. With respect to cancer, the presence of a relatively high amount of transcript in biopsied tissue from an individual may indicate a predisposition for the development of the disease, or may provide a means for detecting the disease prior to the appearance of actual clinical symptoms. A more definitive diagnosis of this type may allow health professionals to employ preventative measures or aggressive treatment earlier thereby preventing the development or further progression of the cancer.

[0445] Moreover, polypeptides of the present invention can be used to treat or prevent diseases or conditions such as, for example, neural disorders, immune system disorders, muscular disorders, reproductive disorders, gastrointestinal disorders, pulmonary disorders, cardiovascular disorders, renal disorders, proliferative disorders, and/or cancerous diseases and conditions. For example, patients can be administered a polypeptide of the present invention in an effort to replace absent or decreased levels of the polypeptide (e.g., insulin), to supplement absent or decreased levels of a different polypeptide (e.g., hemoglobin S for hemoglobin B, SOD, catalase, DNA repair proteins), to inhibit the activity of a polypeptide (e.g., an oncogene or tumor supressor), to activate the activity of a polypeptide (e.g., by binding to a receptor), to reduce the activity of a membrane bound receptor by competing with it for free ligand (e.g., soluble TNF receptors used in reducing inflammation), or to bring about a desired response (e.g., blood vessel growth inhibition, enhancement of the immune response to proliferative cells or tissues).

[0446] Similarly, antibodies directed to a polypeptide of the present invention can also be used to treat disease (as described supra, and elsewhere herein). For example, administration of an antibody directed to a polypeptide of the present invention can bind, and/or neutralize the polypeptide, and/or reduce overproduction of the polypeptide. Similarly, administration of an antibody can activate the polypeptide, such as by binding to a polypeptide bound to a membrane (receptor).

[0447] At the very least, the polypeptides of the present invention can be used as molecular weight markers on SDS-PAGE gels or on molecular sieve gel filtration columns using methods well known to those of skill in the art. Polypeptides can also be used to raise antibodies, which in turn are used to measure protein expression from a recombinant cell, as a way of assessing transformation of the host cell. Moreover, the polypeptides of the present invention can be used to test the biological activities described herein.

Diagnostic Assays

[0448] The compounds of the present invention are useful for diagnosis, treatment, prevention and/or prognosis of various disorders in mammals, preferably humans. Such disorders include, but are not limited to, those related to biological activities described in Tables 1D.1 and 1D.2 and, also as described herein under the section heading “Biological Activities”.

[0449] For a number of disorders, substantially altered (increased or decreased) levels of gene expression can be detected in tissues, cells or bodily fluids (e.g., sera, plasma, urine, semen, synovial fluid or spinal fluid) taken from an individual having such a disorder, relative to a “standard” gene expression level, that is, the expression level in tissues or bodily fluids from an individual not having the disorder. Thus, the invention provides a diagnostic method useful during diagnosis of a disorder, which involves measuring the expression level of the gene encoding the polypeptide in tissues, cells or body fluid from an individual and comparing the measured gene expression level with a standard gene expression level, whereby an increase or decrease in the gene expression level(s) compared to the standard is indicative of a disorder. These diagnostic assays may be performed in vivo or in vitro, such as, for example, on blood samples, biopsy tissue or autopsy tissue.

[0450] The present invention is also useful as a prognostic indicator, whereby patients exhibiting enhanced or depressed gene expression will experience a worse clinical outcome relative to patients expressing the gene at a level nearer the standard level.

[0451] In certain embodiments, a polypeptide of the invention, or polynucleotides, antibodies, agonists, or antagonists corresponding to that polypeptide, may be used to diagnose and/or prognosticate diseases and/or disorders associated with the tissue(s) in which the polypeptide of the invention is expressed, including one, two, three, four, five, or more tissues disclosed in Table 1B.2, column 5 (Tissue Distribution Library Code).

[0452] By “assaying the expression level of the gene encoding the polypeptide” is intended qualitatively or quantitatively measuring or estimating the level of the polypeptide of the invention or the level of the mRNA encoding the polypeptide of the invention in a first biological sample either directly (e.g., by determining or estimating absolute protein level or mRNA level) or relatively (e.g., by comparing to the polypeptide level or mRNA level in a second biological sample). Preferably, the polypeptide expression level or mRNA level in the first biological sample is measured or estimated and compared to a standard polypeptide level or mRNA level, the standard being taken from a second biological sample obtained from an individual not having the disorder or being determined by averaging levels from a population of individuals not having the disorder. As will be appreciated in the art, once a standard polypeptide level or mRNA level is known, it can be used repeatedly as a standard for comparison.

[0453] By “biological sample” is intended any biological sample obtained from an individual, cell line, tissue culture, or other source containing polypeptides of the invention (including portions thereof) or mRNA. As indicated, biological samples include body fluids (such as sera, plasma, urine, synovial fluid and spinal fluid) and tissue sources found to express the full length or fragments thereof of a polypeptide or mRNA. Methods for obtaining tissue biopsies and body fluids from mammals are well known in the art. Where the biological sample is to include mRNA, a tissue biopsy is the preferred source.

[0454] Total cellular RNA can be isolated from a biological sample using any suitable technique such as the single-step guanidinium-thiocyanate-phenol-chloroform method described in Chomczynski and Sacchi, Anal. Biochem. 162:156-159 (1987). Levels of mRNA encoding the polypeptides of the invention are then assayed using any appropriate method. These include Northern blot analysis, S1 nuclease mapping, the polymerase chain reaction (PCR), reverse transcription in combination with the polymerase chain reaction (RT-PCR), and reverse transcription in combination with the ligase chain reaction (RT-LCR).

[0455] The present invention also relates to diagnostic assays such as quantitative and diagnostic assays for detecting levels of polypeptides of the invention, in a biological sample (e.g., cells and tissues), including determination of normal and abnormal levels of polypeptides. Thus, for instance, a diagnostic assay in accordance with the invention for detecting over-expression of polypeptides of the invention compared to normal control tissue samples may be used to detect the presence of tumors. Assay techniques that can be used to determine levels of a polypeptide, such as a polypeptide of the present invention in a sample derived from a host are well-known to those of skill in the art. Such assay methods include radioimmunoassays, competitive-binding assays, Western Blot analysis and ELISA assays. Assaying polypeptide levels in a biological sample can occur using any art-known method.

[0456] Assaying polypeptide levels in a biological sample can occur using antibody-based techniques. For example, polypeptide expression in tissues can be studied with classical immunohistological methods (Jalkanen et al., J. Cell. Biol. 101:976-985 (1985); Jalkanen, M., et al., J. Cell. Biol. 105:3087-3096 (1987)). Other antibody-based methods useful for detecting polypeptide gene expression include immunoassays, such as the enzyme linked immunosorbent assay (ELISA) and the radioimmunoassay (RIA). Suitable antibody assay labels are known in the art and include enzyme labels, such as, glucose oxidase, and radioisotopes, such as iodine (¹²⁵I, ¹²¹I), carbon (¹⁴C), sulfur (³⁵S), tritium (³H), indium (¹¹²In), and technetium (^{99m}Tc), and fluorescent labels, such as fluorescein and rhodamine, and biotin.

[0457] The tissue or cell type to be analyzed will generally include those that are known, or suspected, to express the gene of interest (such as, for example, cancer). The protein isolation methods employed herein may, for example, be such as those described in Harlow and Lane (Harlow, E. and Lane, D., 1988, “Antibodies: A Laboratory Manual”, Cold Spring Harbor Laboratory Press, Cold Spring Harbor, N.Y.), which is incorporated herein by reference in its entirety. The isolated cells can be derived from cell culture or from a patient. The analysis of cells taken from culture may be a necessary step in the assessment of cells that could be used as part of a cell-based gene therapy technique or, alternatively, to test the effect of compounds on the expression of the gene.

[0458] For example, antibodies, or fragments of antibodies, such as those described herein, may be used to quantitatively or qualitatively detect the presence of gene products or conserved variants or peptide fragments thereof. This can be accomplished, for example, by immunofluorescence techniques employing a fluorescently labeled antibody coupled with light microscopic, flow cytometric, or fluorimetric detection.

[0459] In a preferred embodiment, antibodies, or fragments of antibodies directed to any one or all of the predicted epitope domains of the polypeptides of the invention (shown in Table 1B) may be used to quantitatively or qualitatively detect the presence of gene products or conserved variants or peptide fragments thereof. This can be accomplished, for example, by immunofluorescence techniques employing a fluorescently labeled antibody coupled with light microscopic, flow cytometric, or fluorimetric detection.

[0460] In an additional preferred embodiment, antibodies, or fragments of antibodies directed to a conformational epitope of a polypeptide of the invention may be used to quantitatively or qualitatively detect the presence of gene products or conserved variants or peptide fragments thereof. This can be accomplished, for example, by immunofluorescence techniques employing a fluorescently labeled antibody coupled with light microscopic, flow cytometric, or fluorimetric detection.

[0461] The antibodies (or fragments thereof), and/or polypeptides of the present invention may, additionally, be employed histologically, as in immunofluorescence, immunoelectron microscopy or non-immunological assays, for in situ detection of gene products or conserved variants or peptide fragments thereof. In situ detection may be accomplished by removing a histological specimen from a patient, and applying thereto a labeled antibody or polypeptide of the present invention. The antibody (or fragment thereof) or polypeptide is preferably applied by overlaying the labeled antibody (or fragment) onto a biological sample. Through the use of such a procedure, it is possible to determine not only the presence of the gene product, or conserved variants or peptide fragments, or polypeptide binding, but also its distribution in the examined tissue. Using the present invention, those of ordinary skill will readily perceive that any of a wide variety of histological methods (such as staining procedures) can be modified in order to achieve such in situ detection.

[0462] Immunoassays and non-immunoassays for gene products or conserved variants or peptide fragments thereof will typically comprise incubating a sample, such as a biological fluid, a tissue extract, freshly harvested cells, or lysates of cells which have been incubated in cell culture, in the presence of a detectably labeled antibody capable of binding gene products or conserved variants or peptide fragments thereof, and detecting the bound antibody by any of a number of techniques well-known in the art.

[0463] The biological sample may be brought in contact with and immobilized onto a solid phase support or carrier such as nitrocellulose, or other solid support that is capable of immobilizing cells, cell particles or soluble proteins. The support may then be washed with suitable buffers followed by treatment with the detectably labeled antibody or detectable polypeptide of the invention. The solid phase support may then be washed with the buffer a second time to remove unbound antibody or polypeptide. Optionally the antibody is subsequently labeled. The amount of bound label on solid support may then be detected by conventional means.

[0464] By “solid phase support or carrier” is intended any support capable of binding an antigen or an antibody. Well-known supports or carriers include glass, polystyrene, polypropylene, polyethylene, dextran, nylon, amylases, natural and modified celluloses, polyacrylamides, gabbros, and magnetite. The nature of the carrier can be either soluble to some extent or insoluble for the purposes of the present invention. The support material may have virtually any possible structural configuration so long as the coupled molecule is capable of binding to an antigen or antibody. Thus, the support configuration may be spherical, as in a bead, or cylindrical, as in the inside surface of a test tube, or the external surface of a rod. Alternatively, the surface may be flat such as a sheet, test strip, etc. Preferred supports include polystyrene beads. Those skilled in the art will know many other suitable carriers for binding antibody or antigen, or will be able to ascertain the same by use of routine experimentation.

[0465] The binding activity of a given lot of antibody or antigen polypeptide may be determined according to well-known methods. Those skilled in the art will be able to determine operative and optimal assay conditions for each determination by employing routine experimentation.

[0466] In addition to assaying polypeptide levels or polynucleotide levels in a biological sample obtained from an individual, polypeptide or polynucleotide can also be detected in vivo by imaging. For example, in one embodiment of the invention, polypeptides and/or antibodies of the invention are used to image diseased cells, such as neoplasms. In another embodiment, polynucleotides of the invention (e.g., polynucleotides complementary to all or a portion of an mRNA) and/or antibodies (e.g., antibodies directed to any one or a combination of the epitopes of a polypeptide of the invention, antibodies directed to a conformational epitope of a polypeptide of the invention, or antibodies directed to the full length polypeptide expressed on the cell surface of a mammalian cell) are used to image diseased or neoplastic cells.

[0467] Antibody labels or markers for in vivo imaging of polypeptides of the invention include those detectable by X-radiography, NMR, MRI, CAT-scans or ESR. For X-radiography, suitable labels include radioisotopes such as barium or cesium, which emit detectable radiation but are not overtly harmful to the subject. Suitable markers for NMR and ESR include those with a detectable characteristic spin, such as deuterium, which may be incorporated into the antibody by labeling of nutrients for the relevant hybridoma. Where in vivo imaging is used to detect enhanced levels of polypeptides for diagnosis in humans, it may be preferable to use human antibodies or “humanized” chimeric monoclonal antibodies. Such antibodies can be produced using techniques described herein or otherwise known in the art. For example methods for producing chimeric antibodies are known in the art. See, for review, Morrison, Science 229:1202 (1985); Oi et al., BioTechniques 4:214 (1986); Cabilly et al., U.S. Pat. No. 4,816,567; Taniguchi et al., EP 171496; Morrison et al., EP 173494; Neuberger et al., WO 8601533; Robinson et al., WO 8702671; Boulianne et al., Nature 312:643 (1984); Neuberger et al., Nature 314:268 (1985).

[0468] Additionally, any polypeptides of the invention whose presence can be detected can be administered. For example, polypeptides of the invention labeled with a radio-opaque or other appropriate compound can be administered and visualized in vivo, as discussed, above for labeled antibodies. Further, such polypeptides can be utilized for in vitro diagnostic procedures.

[0469] A polypeptide-specific antibody or antibody fragment that has been labeled with an appropriate detectable imaging moiety, such as a radioisotope (for example, ¹³¹I, ¹¹²In, ^{99m}Tc), a radio-opaque substance, or a material detectable by nuclear magnetic resonance, is introduced (for example, parenterally, subcutaneously or intraperitoneally) into the mammal to be examined for a disorder. It will be understood in the art that the size of the subject and the imaging system used will determine the quantity of imaging moiety needed to produce diagnostic images. In the case of a radioisotope moiety, for a human subject, the quantity of radioactivity injected will normally range from about 5 to 20 millicuries of ^{99m}Tc. The labeled antibody or antibody fragment will then preferentially accumulate at the location of cells that contain the antigenic protein. In vivo tumor imaging is described in S. W. Burchiel et al., “Immunopharmacokinetics of Radiolabeled Antibodies and Their Fragments” (Chapter 13 in Tumor Imaging: The Radiochemical Defection of Cancer, S. W. Burchiel and B. A. Rhodes, eds., Masson Publishing Inc. (1982)).

[0470] With respect to antibodies, one of the ways in which an antibody of the present invention can be detectably labeled is by linking the same to a reporter enzyme and using the linked product in an enzyme immunoassay (EIA) (Voller, A., “The Enzyme Linked Immunosorbent Assay (ELISA)”, 1978, Diagnostic Horizons 2:1-7, Microbiological Associates Quarterly Publication, Walkersville, Md.); Voller et al., J. Clin. Pathol. 31:507-520 (1978); Butler, J. E., Meth. Enymol. 73:482-523 (1981); Maggio, E. (ed.), 1980, Enzyme Immunoassay, CRC Press, Boca Raton, Fla.,; Ishikawa, E. et al., (eds.), 1981, Enzyme Immunoassay, Kgaku Shoin, Tokyo). The reporter enzyme that is bound to the antibody will react with an appropriate substrate, preferably a chromogenic substrate, in such a manner as to produce a chemical moiety which can be detected, for example, by spectrophotometric, fluorimetric or by visual means. Reporter enzymes which can be used to detectably label the antibody include, but are not limited to, malate dehydrogenase, staphylococcal nuclease, delta-5-steroid isomerase, yeast alcohol dehydrogenase, alpha-glycerophosphate, dehydrogenase, triose phosphate isomerase, horseradish peroxidase, alkaline phosphatase, asparaginase, glucose oxidase, beta-galactosidase, ribonuclease, urease, catalase, glucose-6-phosphate dehydrogenase, glucoamylase and acetylcholinesterase. Additionally, the detection can be accomplished by colorimetric methods that employ a chromogenic substrate for the reporter enzyme. Detection may also be accomplished by visual comparison of the extent of enzymatic reaction of a substrate in comparison with similarly prepared standards.

[0471] Detection may also be accomplished using any of a variety of other immunoassays. For example, by radioactively labeling the antibodies or antibody fragments, it is possible to detect polypeptides through the use of a radioimmunoassay (RIA) (see, for example, Weintraub, B., Principles of Radioimmunoassays, Seventh Training Course on Radioligand Assay Techniques, The Endocrine Society, March, 1986, which is incorporated by reference herein). The radioactive isotope can be detected by means including, but not limited to, a gamma counter, a scintillation counter, or autoradiography.

[0472] It is also possible to label the antibody with a fluorescent compound. When the fluorescently labeled antibody is exposed to light of the proper wave length, its presence can then be detected due to fluorescence. Among the most commonly used fluorescent labeling compounds are fluorescein isothiocyanate, rhodamine, phycoerythrin, phycocyanin, allophycocyanin, ophthaldehyde and fluorescamine.

[0473] The antibody can also be detectably labeled using fluorescence emitting metals such as ¹⁵²Eu, or others of the lanthanide series. These metals can be attached to the antibody using such metal chelating groups as diethylenetriaminepentacetic acid (DTPA) or ethylenediaminetetraacetic acid (EDTA).

[0474] The antibody also can be detectably labeled by coupling it to a chemiluminescent compound. The presence of the chemiluminescent-tagged antibody is then determined by detecting the presence of luminescence that arises during the course of a chemical reaction. Examples of particularly useful chemiluminescent labeling compounds are luminol, isoluminol, theromatic acridinium ester, imidazole, acridinium salt, and oxalate ester.

[0475] Likewise, a bioluminescent compound may be used to label the antibody of the present invention. Bioluminescence is a type of chemiluminescence found in biological systems in, which a catalytic protein increases the efficiency of the chemiluminescent reaction. The presence of a bioluminescent protein is determined by detecting the presence of luminescence. Important bioluminescent compounds for purposes of labeling are luciferin, luciferase and aequorin.

Methods for Detecting Diseases

[0476] In general, a disease may be detected in a patient based on the presence of one or more proteins of the invention and/or polynucleotides encoding such proteins in a biological sample (for example, blood, sera, urine, and/or tumor biopsies) obtained from the patient. In other words, such proteins may be used as markers to indicate the presence or absence of a disease or disorder, including cancer and/or as described elsewhere herein. In addition, such proteins may be useful for the detection of other diseases and cancers. The binding agents provided herein generally permit detection of the level of antigen that binds to the agent in the biological sample. Polynucleotide primers and probes may be used to detect the level of mRNA encoding polypeptides of the invention, which is also indicative of the presence or absence of a disease or disorder, including cancer. In general, polypeptides of the invention should be present at a level that is at least three fold higher in diseased tissue than in normal tissue.

[0477] There are a variety of assay formats known to those of ordinary skill in the art for using a binding agent to detect polypeptide markers in a sample. See, e.g., Harlow and Lane, supra. In general, the presence or absence of a disease in a patient may be determined by (a) contacting a biological sample obtained from a patient with a binding agent; (b) detecting in the sample a level of polypeptide that binds to the binding agent; and (c) comparing the level of polypeptide with a predetermined cut-off value.

[0478] In a preferred embodiment, the assay involves the use of a binding agent(s) immobilized on a solid support to bind to and remove the polypeptide of the invention from the remainder of the sample. The bound polypeptide may then be detected using a detection reagent that contains a reporter group and specifically binds to the binding agent/polypeptide complex. Such detection reagents may comprise, for example, a binding agent that specifically binds to the polypeptide or an antibody or other agent that specifically binds to the binding agent, such as an anti-immunoglobulin, protein G, protein A or a lectin. Alternatively, a competitive assay may be utilized, in which a polypeptide is labeled with a reporter group and allowed to bind to the immobilized binding agent after incubation of the binding agent with the sample. The extent to which components of the sample inhibit the binding of the labeled polypeptide to the binding agent is indicative of the reactivity of the sample with the immobilized binding agent. Suitable polypeptides for use within such assays include polypeptides of the invention and portions thereof, or antibodies, to which the binding agent binds, as described above.

[0479] The solid support may be any material known to those of skill in the art to which polypeptides of the invention may be attached. For example, the solid support may be a test well in a microtiter plate or a nitrocellulose or other suitable membrane. Alternatively, the support may be a bead or disc, such as glass fiberglass, latex or a plastic material such as polystyrene or polyvinylchloride. The support may also be a magnetic particle or a fiber optic sensor, such as those disclosed, for example, in U.S. Pat. No. 5,359,681. The binding agent may be immobilized on the solid support using a variety of techniques known to those of skill in the art, which are amply described in the patent and scientific literature. In the context of the present invention, the term “immobilization” refers to both noncovalent association, such as adsorption, and covalent attachment (which may be a direct linkage between the agent and functional groups on the support or may be a linkage by way of a cross-linking agent). Immobilization by adsorption to a well in a microtiter plate or to a membrane is preferred. In such cases, adsorption may be achieved by contacting the binding agent, in a suitable buffer, with the solid support for the suitable amount of time. The contact time varies with temperature, but is typically between about 1 hour and about 1 day. In general, contacting a well of plastic microtiter plate (such as polystyrene or polyvinylchloride) with an amount of binding agent ranging from about 10 ng to about 10 μg, and preferably about 100 ng to about 1 μg, is sufficient to immobilize an adequate amount of binding agent.

[0480] Covalent attachment of binding agent to a solid support may generally be achieved by first reacting the support with a bifunctional reagent that will react with both the support and a functional group, such as a hydroxyl or amino group, on the binding agent. For example, the binding agent may be covalently attached to supports having an appropriate polymer coating using benzoquinone or by condensation of an aldehyde group on the support with an amine and an active hydrogen on the binding partner (see, e.g., Pierce Immunotechnology Catalog and Handbook, 1991, at A12-A13).

Gene Therapy Methods

[0481] Also encompassed by the invention are gene therapy methods for treating or preventing disorders, diseases and conditions. The gene therapy methods relate to the introduction of nucleic acid (DNA, RNA and antisense DNA or RNA) sequences into an animal to achieve expression of the polypeptide of the present invention. This method requires a polynucleotide that codes for a polypeptide of the present invention operatively linked to a promoter and any other genetic elements necessary for the expression of the polypeptide by the target tissue. Such gene therapy and delivery techniques are known in the art, see, for example, WO90/11092, which is herein incorporated by reference.

[0482] Thus, for example, cells from a patient may be engineered with a polynucleotide (DNA or RNA) comprising a promoter operably linked to a polynucleotide of the present invention ex vivo, with the engineered cells then being provided to a patient to be treated with the polypeptide of the present invention. Such methods are well-known in the art. For example, see Belldegrun, A., et al., J. Natl. Cancer Inst. 85: 207-216 (1993); Ferrantini, M. et al., Cancer Research 53: 1107-1112 (1993); Ferrantini, M. et al., J. Immunology 153: 4604-4615 (1994); Kaido, T., et al., Int. J. Cancer 60: 221-229 (1995); Ogura, H., et al., Cancer Research 50: 5102-5106 (1990); Santodonato, L., et al., Human Gene Therapy 7:1-10 (1996); Santodonato, L., et al., Gene Therapy 4:1246-1255 (1997); and Zhang, J.-F. et al., Cancer Gene Therapy 3: 31-38 (1996)), which are herein incorporated by reference. In one embodiment, the cells that are engineered are arterial cells. The arterial cells may be reintroduced into the patient through direct injection to the artery, the tissues surrounding the artery, or through catheter injection.

[0483] As discussed in more detail below, the polynucleotide constructs can be delivered by any method that delivers injectable materials to the cells of an animal, such as, injection into the interstitial space of tissues (heart, muscle, skin, lung, liver, and the like). The polynucleotide constructs may be delivered in a pharmaceutically acceptable liquid or aqueous carrier.

[0484] In one embodiment, the polynucleotide of the present invention is delivered as a naked polynucleotide. The term “naked” polynucleotide, DNA or RNA refers to sequences that are free from any delivery vehicle that acts to assist, promote or facilitate entry into the cell, including viral sequences, viral particles, liposome formulations, LIPOFECTIN™ or precipitating agents and the like. However, the polynucleotide of the present invention can also be delivered in liposome formulations and LIPOFECTIN™ formulations and the like can be prepared by methods well known to those skilled in the art. Such methods are described, for example, in U.S. Pat. Nos. 5,593,972, 5,589,466, and 5,580,859, which are herein incorporated by reference.

[0485] The polynucleotide vector constructs used in the gene therapy method are preferably constructs that will not integrate into the host genome nor will they contain sequences that allow for replication. Appropriate vectors include pWLNEO, pSV2CAT, pOG44, pXT1 and pSG available from STRATAGENE™; pSVK3, pBPV, pMSG and pSVL available from PHARMACIA™; and pEF1/NV5, pcDNA3.1, and pRc/CMV2 available from Invitrogen. Other suitable vectors will be readily apparent to the skilled artisan.

[0486] Any strong promoter known to those skilled in the art can be used for driving the expression of the polynucleotide sequence. Suitable promoters include adenoviral promoters, such as the adenoviral major late promoter; or heterologous promoters, such as the cytomegalovirus (CMV) promoter; the respiratory syncytial virus (RSV) promoter; inducible promoters, such as the MMT promoter, the metallothionein promoter; heat shock promoters; the albumin promoter; the ApoA1 promoter; human globin promoters; viral thymidine kinase promoters, such as the Herpes Simplex thymidine kinase promoter; retroviral LTRs; the b-actin promoter; and human growth hormone promoters. The promoter also may be the native promoter for the polynucleotide of the present invention.

[0487] Unlike other gene therapy techniques, one major advantage of introducing naked nucleic acid sequences into target cells is the transitory nature of the polynucleotide synthesis in the cells. Studies have shown that non-replicating DNA sequences can be introduced into cells to provide production of the desired polypeptide for periods of up to six months.

[0488] The polynucleotide construct can be delivered to the interstitial space of tissues within the an animal, including of muscle, skin, brain lung, liver, spleen, bone marrow, thymus, heart, lymph, blood, bone, cartilage, pancreas, kidney, gall bladder, stomach, intestine, testis, ovary, uterus, rectum, nervous system, eye, gland, and connective tissue. Interstitial space of the tissues comprises the intercellular, fluid, mucopolysaccharide matrix among the reticular fibers of organ tissues, elastic fibers in the walls of vessels or chambers, collagen fibers of fibrous tissues, or that same matrix within connective tissue ensheathing muscle cells or in the lacunae of bone. It is similarly the space occupied by the plasma of the circulation and the lymph fluid of the lymphatic channels. Delivery to the interstitial space of muscle tissue is preferred for the reasons discussed below. They may be conveniently delivered by injection into the tissues comprising these cells. They are preferably delivered to and expressed in persistent, non-dividing cells that are differentiated, although delivery and expression may be achieved in non-differentiated or less completely differentiated cells, such as, for example, stem cells of blood or skin fibroblasts. In vivo muscle cells are particularly competent in their ability to take up and express polynucleotides.

[0489] For the naked nucleic acid sequence injection, an effective dosage amount of DNA or RNA will be in the range of from about 0.05 mg/kg body weight to about 50 mg/kg body weight. Preferably the dosage will be from about 0.005 mg/kg to about 20 mg/kg and more preferably from about 0.05 mg/kg to about 5 mg/kg. Of course, as the artisan of ordinary skill will appreciate, this dosage will vary according to the tissue site of injection. The appropriate and effective dosage of nucleic acid sequence can readily be determined by those of ordinary skill in the art and may depend on the condition being treated and the route of administration.

[0490] The preferred route of administration is by the parenteral route of injection into the interstitial space of tissues. However, other parenteral routes may also be used, such as, inhalation of an aerosol formulation particularly for delivery to lungs or bronchial tissues, throat or mucous membranes of the nose. In addition, naked DNA constructs can be delivered to arteries during angioplasty by the catheter used in the procedure.

[0491] The naked polynucleotides are delivered by any method known in the art, including, but not limited to, direct needle injection at the delivery site, intravenous injection, topical administration, catheter infusion, and so-called “gene guns”. These delivery methods are known in the art.

[0492] The constructs may also be delivered with delivery vehicles such as viral sequences, viral particles, liposome formulations, LIPOFECTIN™, precipitating agents, etc. Such methods of delivery are known in the art.

[0493] In certain embodiments, the polynucleotide constructs are complexed in a liposome preparation. Liposomal preparations for use in the instant invention include cationic (positively charged), anionic (negatively charged) and neutral preparations. However, cationic liposomes are particularly preferred because a tight charge complex can be formed between the cationic liposome and the polyanionic nucleic acid. Cationic liposomes have been shown to mediate intracellular delivery of plasmid DNA (Felgner et al., Proc. Natl. Acad. Sci. USA (1987) 84:7413-7416, which is herein incorporated by reference); mRNA (Malone et al., Proc. Natl. Acad. Sci. USA (1989) 86:6077-6081, which is herein incorporated by reference); and purified transcription factors (Debs et al., J. Biol. Chem. (1990) 265:10189-10192, which is herein incorporated by reference), in functional form.

[0494] Cationic liposomes are readily available. For example, N[1-2,3-dioleyloxy)propyl]-N,N,N-triethylammonium (DOTMA) liposomes are particularly useful and are available under the trademark LIPOFECTIN™, from GIBCO BRL, Grand Island, N.Y. (See, also, Felgner et al., Proc. Natl Acad. Sci. USA (1987) 84:7413-7416, which is herein incorporated by reference). Other commercially available liposomes include transfectace (DDAB/DOPE) and DOTAP/DOPE (Boehringer).

[0495] Other cationic liposomes can be prepared from readily available materials using techniques well known in the art. See, e.g. PCT Publication No. WO 90/11092 (which is herein incorporated by reference) for a description of the synthesis of DOTAP (1,2-bis(oleoyloxy)-3-(trimethylammonio)propane)liposomes. Preparation of DOTMA liposomes is explained in the literature, see, e.g., P. Felgner et al., Proc. Natl. Acad. Sci. USA 84:7413-7417, which is herein incorporated by reference. Similar methods can be used to prepare liposomes from other cationic lipid materials.

[0496] Similarly, anionic and neutral liposomes are readily available, such as from Avanti Polar Lipids (Birmingham, Ala.), or can be easily prepared using readily available materials. Such materials include phosphatidyl, choline, cholesterol, phosphatidyl ethanolamine, dioleoylphosphatidyl choline (DOPC), dioleoylphosphatidyl glycerol (DOPG), dioleoylphoshatidyl ethanolamine (DOPE), among others. These materials can also be mixed with the DOTMA and DOTAP starting materials in appropriate ratios. Methods for making liposomes using these materials are well known in the art.

[0497] For example, commercially dioleoylphosphatidyl choline (DOPC), dioleoylphosphatidyl glycerol (DOPG), and dioleoylphosphatidyl ethanolamine (DOPE) can be used in various combinations to make conventional liposomes, with or without the addition of cholesterol. Thus, for example, DOPG/DOPC vesicles can be prepared by drying 50 mg each of DOPG and DOPC under a stream of nitrogen gas into a sonication vial. The sample is placed under a vacuum pump overnight and is hydrated the following day with deionized water. The sample is then sonicated for 2 hours in a capped vial, using a Heat Systems model 350 sonicator equipped with an inverted cup (bath type) probe at the maximum setting while the bath is circulated at 15EC. Alternatively, negatively charged vesicles can be prepared without sonication to produce multilamellar vesicles or by extrusion through nucleopore membranes to produce unilamellar vesicles of discrete size. Other methods are known and available to those of skill in the art.

[0498] The liposomes can comprise multilamellar vesicles (MLVs), small unilamellar vesicles (SUVs), or large unilamellar vesicles (LUVs), with SUVs being preferred. The various liposome-nucleic acid complexes are prepared using methods well known in the art. See, e.g., Straubinger et al., Methods of Immunology (1983), 101:512-527, which is herein incorporated by reference. For example, MLVs containing nucleic acid can be prepared by depositing a thin film of phospholipid on the walls of a glass tube and subsequently hydrating with a solution of the material to be encapsulated. SUVs are prepared by extended sonication of MLVs to produce a homogeneous population of unilamellar liposomes. The material to be entrapped is added to a suspension of preformed MLVs and then sonicated. When using liposomes containing cationic lipids, the dried lipid film is resuspended in an appropriate solution such as sterile water or an isotonic buffer solution such as 10 mM Tris/NaCl, sonicated, and then the preformed liposomes are mixed directly with the DNA. The liposome and DNA form a very stable complex due to binding of the positively charged liposomes to the cationic DNA. SUVs find use with small nucleic acid fragments. LUVs are prepared by a number of methods, well known in the art. Commonly used methods include Ca²⁺-EDTA chelation (Papahadjopoulos et al., Biochim. Biophys. Acta (1975) 394:483; Wilson et al., Cell 17:77 (1979)); ether injection (Deamer, D. and Bangham, A., Biochim. Biophys. Acta 443:629 (1976); Ostro et al., Biochem. Biophys. Res. Commun. 76:836 (1977); Fraley et al., Proc. Natl. Acad. Sci. USA 76:3348 (1979)); detergent dialysis (Enoch, H. and Strittmatter, P., Proc. Natl. Acad. Sci. USA 76:145 (1979)); and reverse-phase evaporation (REV) (Fraley et al., J. Biol. Chem. 255:10431 (1980); Szoka, F. and Papahadjopoulos, D., Proc. Natl. Acad. Sci. USA 75:145 (1978); Schaefer-Ridder et al., Science 215:166 (1982)), which are herein incorporated by reference.

[0499] Generally, the ratio of DNA to liposomes will be from about 10:1 to about 1:10. Preferably, the ration will be from about 5:1 to about 1:5. More preferably, the ration will be about 3:1 to about 1:3. Still more preferably, the ratio will be about 1:1.

[0500] U.S. Pat. No. 5,676,954 (which is herein incorporated by reference) reports on the injection of genetic material, complexed with cationic liposomes carriers, into mice. U.S. Pat. Nos. 4,897,355, 4,946,787, 5,049,386, 5,459,127, 5,589,466, 5,693,622, 5,580,859, 5,703,055, and international publication no. WO 94/9469 (which are herein incorporated by reference) provide cationic lipids for use in transfecting DNA into cells and mammals. U.S. Pat. Nos. 5,589,466, 5,693,622, 5,580,859, 5,703,055, and international publication no. WO 94/9469 provides methods for delivering DNA-cationic lipid complexes to mammals.

[0501] In certain embodiments, cells are engineered, ex vivo or in vivo, using a retroviral particle containing RNA that comprises a sequence encoding a polypeptide of the present invention. Retroviruses from which the retroviral plasmid vectors may be derived include, but are not limited to, Moloney Murine Leukemia Virus, spleen necrosis virus, Rous sarcoma Virus, Harvey Sarcoma Virus, avian leukosis virus, gibbon ape leukemia virus, human immunodeficiency virus, Myeloproliferative Sarcoma Virus, and mammary tumor virus.

[0502] The retroviral plasmid vector is employed to transduce packaging cell lines to form producer cell lines. Examples of packaging cells which may be transfected include, but are not limited to, the PE501, PA317, R-2, R-AM, PA12, T19-14×, VT-19-17-H2, RCRE, RCRIP, GP+E-86, GP+envAm12, and DAN cell lines as described in Miller, Human Gene Therapy 1:5-14 (1990), which is incorporated herein by reference in its entirety. The vector may transduce the packaging cells through any means known in the art. Such means include, but are not limited to, electroporation, the use of liposomes, and CaPO₄ precipitation. In one alternative, the retroviral plasmid vector may be encapsulated into a liposome, or coupled to a lipid, and then administered to a host

[0503] The producer cell line generates infectious retroviral vector particles that include polynucleotide encoding a polypeptide of the present invention. Such retroviral vector particles then may be employed, to transduce eukaryotic cells, either in vitro or in vivo. The transduced eukaryotic cells will express a polypeptide of the present invention.

[0504] In certain other embodiments, cells are engineered, ex vivo or in vivo, with polynucleotide contained in an adenovirus vector. Adenovirus can be manipulated such that it encodes and expresses a polypeptide of the present invention, and at the same time is inactivated in terms of its ability to replicate in a normal lytic viral life cycle. Adenovirus expression is achieved without integration of the viral DNA into the host cell chromosome, thereby alleviating concerns about insertional mutagenesis. Furthermore, adenoviruses have been used as live enteric vaccines for many years with an excellent safety profile (Schwartz et al. Am. Rev. Respir. Dis. 109:233-238 (1974)). Finally, adenovirus mediated gene transfer has been demonstrated in a number of instances including transfer of alpha-1-antitrypsin and CFTR to the lungs of cotton rats (Rosenfeld, M. A. et al. (1991) Science 252:431-434; Rosenfeld et al., (1992) Cell 68:143-155). Furthermore, extensive studies to attempt to establish adenovirus as a causative agent in human cancer were uniformly negative (Green, M. et al. (1979) Proc. Natl. Acad. Sci. USA 76:6606).

[0505] Suitable adenoviral vectors useful in the present invention are described, for example, in Kozarsky and Wilson, Curr. Opin. Genet. Devel. 3:499-503 (1993); Rosenfeld et al., Cell 68:143-155 (1992); Engelhardt et al., Human Genet. Ther. 4:759-769 (1993); Yang et al., Nature Genet. 7:362-369 (1994); Wilson et al., Nature 365:691-692 (1993); and U.S. Pat. No. 5,652,224, which are herein incorporated by reference. For example, the adenovirus vector Ad2 is useful and can be grown in human 293 cells. These cells contain the E1 region of adenovirus and constitutively express E1a and E1b, which complement the defective adenoviruses by providing the products of the genes deleted from the vector. In addition to Ad2, other varieties of adenovirus (e.g., Ad3, Ad5, and Ad7) are also useful in the present invention.

[0506] Preferably, the adenoviruses used in the present invention are replication deficient. Replication deficient adenoviruses require the aid of a helper virus and/or packaging cell line to form infectious particles. The resulting virus is capable of infecting cells and can express a polynucleotide of interest that is operably linked to a promoter, but cannot replicate in most cells. Replication deficient adenoviruses may be deleted in one or more of all or a portion of the following genes: E1a, E1b, E3, E4, E2a, or L1 through L5.

[0507] In certain other embodiments, the cells are engineered, ex vivo or in vivo, using an adeno-associated virus (AAV). AAVs are naturally occurring defective viruses that require helper viruses to produce infectious particles (Muzyczka, N., Curr. Topics in Microbiol. Immunol. 158:97 (1992)). It is also one of the few viruses that may integrate its DNA into non-dividing cells. Vectors containing as little as 300 base pairs of AAV can be packaged and can integrate, but space for exogenous DNA is limited to about 4.5 kb. Methods for producing and using such AAVs are known in the art. See, for example, U.S. Pat. Nos. 5,139,941, 5,173,414, 5,354,678, 5,436,146, 5,474,935, 5,478,745, and 5,589,377.

[0508] For example, an appropriate AAV vector for use in the present invention will include all the sequences necessary for DNA replication, encapsidation, and host-cell integration. The polynucleotide construct is inserted into the AAV vector using standard cloning methods, such as those found in Sambrook et al., Molecular Cloning: A Laboratory Manual, Cold Spring Harbor Press (1989). The recombinant AAV vector is then transfected into packaging cells which are infected with a helper virus, using any standard technique, including lipofection, electroporation, calcium phosphate precipitation, etc. Appropriate helper viruses include adenoviruses, cytomegaloviruses, vaccinia viruses, or herpes viruses. Once the packaging cells are transfected and infected, they will produce infectious AAV viral particles that contain the polynucleotide construct. These viral particles are then used to transduce eukaryotic cells, either ex vivo or in vivo. The transduced cells will contain the polynucleotide construct integrated into its genome, and will express a polypeptide of the invention.

[0509] Another method of gene therapy involves operably associating heterologous control regions and endogenous polynucleotide sequences (e.g. encoding a polypeptide of the present invention) via homologous recombination (see, e.g., U.S. Pat. No. 5,641,670, issued Jun. 24, 1997; International Publication No. WO 96/29411, published Sep. 26, 1996; International Publication No. WO 94/12650, published Aug. 4, 1994; Koller et al., Proc. Natl. Acad. Sci. USA 86:8932-8935 (1989); and Zijlstra et al., Nature 342:435-438 (1989), which are herein incorporated by reference. This method involves the activation of a gene which is present in the target cells, but which is not normally expressed in the cells, or is expressed at a lower level than desired.

[0510] Polynucleotide constructs are made, using standard techniques known in the art, which contain the promoter with targeting sequences flanking the promoter. Suitable promoters are described herein. The targeting sequence is sufficiently complementary to an endogenous sequence to permit homologous recombination of the promoter-targeting sequence with the endogenous sequence. The targeting sequence will be sufficiently near the 5′ end of the desired endogenous polynucleotide sequence so the promoter will be operably linked to the endogenous sequence upon homologous recombination.

[0511] The promoter and the targeting sequences can be amplified using PCR. Preferably, the amplified promoter contains distinct restriction enzyme sites on the 5′ and 3′ ends. Preferably, the 3′ end of the first targeting sequence contains the same restriction enzyme site as the 5′ end of the amplified promoter and the 5′ end of the second targeting sequence contains the same restriction site as the 3′ end of the amplified promoter. The amplified promoter and targeting sequences are digested and ligated together.

[0512] The promoter-targeting sequence construct is delivered to the cells, either as naked polynucleotide, or in conjunction with transfection-facilitating agents, such as liposomes, viral sequences, viral particles, whole viruses, lipofection, precipitating agents, etc., described in more detail above. The P promoter-targeting sequence can be delivered by any method, included direct needle injection, intravenous injection, topical administration, catheter infusion, particle accelerators, etc. The methods are described in more detail below.

[0513] The promoter-targeting sequence construct is taken up by cells. Homologous recombination between the construct and the endogenous sequence takes place, such that an endogenous sequence is placed under the control of the promoter. The promoter then drives the expression of the endogenous sequence.

[0514] The polynucleotide encoding a polypeptide of the present invention may contain a secretory signal sequence that facilitates secretion of the protein. Typically, the signal sequence is positioned in the coding region of the polynucleotide to be expressed towards or at the 5′ end of the coding region. The signal sequence may be homologous or heterologous to the polynucleotide of interest and may be homologous or heterologous to the cells to be transfected. Additionally, the signal sequence may be chemically synthesized using methods known in the art.

[0515] Any mode of administration of any of the above-described polynucleotides constructs can be used so long as the mode results in the expression of one or more molecules in an amount sufficient to provide a therapeutic effect. This includes direct needle injection, systemic injection, catheter infusion, biolistic injectors, particle accelerators (i.e., “gene guns”), gelfoam sponge depots, other commercially available depot materials, osmotic pumps (e.g., Alza minipumps), oral or suppositorial solid (tablet or pill) pharmaceutical formulations, and decanting or topical applications during surgery. For example, direct injection of naked calcium phosphate-precipitated plasmid into rat liver and rat spleen or a protein-coated plasmid into the portal vein has resulted in gene expression of the foreign gene in the rat livers (Kaneda et al., Science 243:375 (1989)).

[0516] A preferred method of local administration is by direct injection. Preferably, a recombinant molecule of the present invention complexed with a delivery vehicle is administered by direct injection into or locally within the area of arteries. Administration of a composition locally within the area of arteries refers to injecting the composition centimeters and preferably, millimeters within arteries.

[0517] Another method of local administration is to contact a polynucleotide construct of the present invention in or around a surgical wound. For example, a patient can undergo surgery and the polynucleotide construct can be coated on the surface of tissue inside the wound or the construct can be injected into areas of tissue inside the wound.

[0518] Therapeutic compositions useful in systemic administration include recombinant molecules of the present invention complexed to a targeted delivery vehicle of the present invention. Suitable delivery vehicles for use with systemic administration comprise liposomes comprising ligands for targeting the vehicle to a particular site. In specific embodiments, suitable delivery vehicles for use with systemic administration comprise liposomes comprising polypeptides of the invention for targeting the vehicle to a particular site.

[0519] Preferred methods of systemic administration, include intravenous injection, aerosol, oral and percutaneous (topical) delivery. Intravenous injections can be performed using methods standard in the art. Aerosol delivery can also be performed using methods standard in the art (see, for example, Stribling et al., Proc. Natl. Acad. Sci. USA 189:11277-11281, 1992, which is incorporated herein by reference). Oral delivery can be performed by complexing a polynucleotide construct of the present invention to a carrier capable of withstanding degradation by digestive enzymes in the gut of an animal. Examples of such carriers include plastic capsules or tablets, such as those known in the art. Topical delivery can be performed by mixing a polynucleotide construct of the present invention with a lipophilic reagent (e.g., DMSO) that is capable of passing into the skin.

[0520] Determining an effective amount of substance to be delivered can depend upon a number of factors including, for example, the chemical structure and biological activity of the substance, the age and weight of the animal, the precise condition requiring treatment and its severity, and the route of administration. The frequency of treatments depends upon a number of factors, such as the amount of polynucleotide constructs administered per dose, as well as the health and history of the subject. The precise amount, number of doses, and timing of doses will be determined by the attending physician or veterinarian.

[0521] Therapeutic compositions of the present invention can be administered to any animal, preferably to mammals and birds. Preferred mammals include humans, dogs, cats, mice, rats, rabbits sheep, cattle, horses and pigs, with humans being particularly preferred.

Biological Activities

[0522] Polynucleotides or polypeptides, or agonists or antagonists of the present invention, can be used in assays to test for one or more biological activities. If these polynucleotides or polypeptides, or agonists or antagonists of the present invention, do exhibit activity in a particular assay, it is likely that these molecules may be involved in the diseases associated with the biological activity. Thus, the polynucleotides and polypeptides, and agonists or antagonists could be used to treat the associated disease.

[0523] Members of the secreted family of proteins are believed to be involved in biological activities associated with, for example, cellular signaling. Accordingly, compositions of the invention (including polynucleotides, polypeptides and antibodies of the invention, and fragments and variants thereof) may be used in diagnosis, prognosis, prevention and/or treatment of diseases and/or disorders associated with aberrant activity of secreted polypeptides.

[0524] In preferred embodiments, compositions of the invention (including polynucleotides, polypeptides and antibodies of the invention, and fragments and variants thereof) may be used in the diagnosis, prognosis, prevention, treatment, and/or amelioration of diseases and/or disorders relating to the immune system (e.g., allergic reactions, asthma, anaphylaxis, hypersensitivity to an antigenic molecule, rhinitis, eczema, and as described in the “Gastrointestinal Disorders”, “Respiratory Disorders”, and “Wound Healing and Epithelial Cell Proliferation” sections below).

[0525] In certain embodiments, a polypeptide of the invention, or polynucleotides, antibodies, agonists, or antagonists corresponding to that polypeptide, may be used to diagnose and/or prognosticate diseases and/or disorders associated with the tissue(s) in which the polypeptide of the invention is expressed including one, two, three, four, five, or more tissues disclosed in Table 1B.2, column 5 (Tissue Distribution Library Code).

[0526] Thus, polynucleotides, translation products and antibodies of the invention are useful in the diagnosis, detection, prevention, prognistication, and/or treatment of diseases and/or disorders associated with activities that include, but are not limited to, prohormone activation, neurotransmitter activity, cellular signaling, cellular proliferation, cellular differentiation, and cell migration.

[0527] More generally, polynucleotides, translation products and antibodies corresponding to this gene may be useful for the diagnosis, prognosis, prevention, treatment and/or amelioration of diseases and/or disorders associated with the following system or systems.

Immune Activity

[0528] Polynucleotides, polypeptides, antibodies, and/or agonists or antagonists of the present invention may be useful in preventing, diagnosing, prognosticating, treating, and/or ameliorating diseases, disorders, and/or conditions of the immune system, by, for example, activating or inhibiting the proliferation, differentiation, or mobilization (chemotaxis) of immune cells. Immune cells develop through a process called hematopoiesis, producing myeloid (platelets, red blood cells, neutrophils, and macrophages) and lymphoid (B and T lymphocytes) cells from pluripotent stem cells. The etiology of these immune diseases, disorders, and/or conditions may be genetic, somatic, such as cancer and some autoimmune diseases, acquired (e.g., by chemotherapy or toxins), or infectious. Moreover, polynucleotides, polypeptides, antibodies, and/or agonists or antagonists of the present invention can be used as a marker or detector of a particular immune system disease or disorder.

[0529] In another embodiment, a polypeptide of the invention, or polynucleotides, antibodies, agonists, or antagonists corresponding to that polypeptide, may be used to treat diseases and disorders of the immune system and/or to inhibit or enhance an immune response generated by cells associated with the tissue(s) in which the polypeptide of the invention is expressed, including one, two, three, four, five, or more tissues disclosed in Table 1B.2, column 5 (Tissue Distribution Library Code).

[0530] Polynucleotides, polypeptides, antibodies, and/or agonists or antagonists of the present invention may be useful in preventing, diagnosing, prognosticating, treating and/or ameliorating immunodeficiencies, including both congenital and acquired immunodeficiencies. Examples of B cell immunodeficiencies in which immunoglobulin levels B cell function and/or B cell numbers are decreased include: X-linked agammaglobulinemia (Bruton's disease), X-linked infantile agammaglobulinemia, X-linked immunodeficiency with hyper IgM, non X-linked immunodeficiency with hyper IgM, X-linked lymphoproliferative syndrome (XLP), agammaglobulinemia including congenital and acquired agammaglobulinemia, adult onset agammaglobulinemia, late-onset agammaglobulinemia, dysgammaglobulinemia, hypogammaglobulinemia, unspecified hypogammaglobulinemia, recessive agammaglobulinemia (Swiss type), Selective IgM deficiency, selective IgA deficiency, selective IgG subclass deficiencies, IgG subclass deficiency (with or without IgA deficiency), Ig deficiency with increased IgM, IgG and IgA deficiency with increased IgM, antibody deficiency with normal or elevated Igs, Ig heavy chain deletions, kappa chain deficiency, B cell lymphoproliferative disorder (BLPD), common variable immunodeficiency (CVID), common variable immunodeficiency (CVI) (acquired), and transient hypogammaglobulinemia of infancy.

[0531] In specific embodiments, ataxia-telangiectasia or conditions associated with ataxia-telangiectasia are detected, prevented, diagnosed, prognosticated, treated, and/or ameliorated using the polypeptides or polynucleotides of the invention, and/or agonists or antagonists thereof.

[0532] Examples of congenital immunodeficiencies in which T cell and/or B cell function and/or number is decreased include, but are not limited to: DiGeorge anomaly, severe combined immunodeficiencies (SCID) (including, but not limited to, X-linked SCID, autosomal recessive SCID, adenosine deaminase deficiency, purine nucleoside phosphorylase (PNP) deficiency, Class II MHC deficiency (Bare lymphocyte syndrome), Wiskott-Aldrich syndrome, and ataxia telangiectasia), thymic hypoplasia, third and fourth pharyngeal pouch syndrome, 22q11.2 deletion, chronic mucocutaneous candidiasis, natural killer cell deficiency (NK), idiopathic CD4+ T-lymphocytopenia, immunodeficiency with predominant T cell defect (unspecified), and unspecified immunodeficiency of cell mediated immunity.

[0533] In specific embodiments, DiGeorge anomaly or conditions associated with DiGeorge anomaly are prevented, detected, diagnosed, prognosticated, treated and/or ameliorated using polypeptides or polynucleotides of the invention, or antagonists or agonists thereof.

[0534] Other immunodeficiencies that may be prevented, detected, diagnosed, prognosticated, treated and/or ameliorated using polypeptides or polynucleotides of the invention, and/or agonists or antagonists thereof, include, but are not limited to, chronic granulomatous disease, Chédiak-Higashi syndrome, myeloperoxidase deficiency, leukocyte glucose-6-phosphate dehydrogenase deficiency, X-linked lymphoproliferative syndrome (XLP), leukocyte adhesion deficiency, complement component deficiencies (including C1, C2, C3, C4, C5, C6, C7, C8 and/or C9 deficiencies), reticular dysgenesis, thymic alymphoplasia-aplasia, immunodeficiency with thymoma, severe congenital leukopenia, dysplasia with immunodeficiency, neonatal neutropenia, short limbed dwarfism, and Nezelof syndrome-combined immunodeficiency with Igs.

[0535] In a preferred embodiment, the immunodeficiencies and/or conditions associated with the immunodeficiencies recited above are prevented, detected, diagnosed, prognosticated, treated and/or ameliorated using polynucleotides, polypeptides, antibodies, and/or agonists or antagonists of the present invention.

[0536] In a preferred embodiment polynucleotides, polypeptides, antibodies, and/or agonists or antagonists of the present invention could be used as an agent to boost immunoresponsiveness among immunodeficient individuals. In specific embodiments, polynucleotides, polypeptides, antibodies, and/or agonists or antagonists of the present invention could be used as an agent to boost immunoresponsiveness among B cell and/or T cell immunodeficient individuals.

[0537] The polynucleotides, polypeptides, antibodies, and/or agonists or antagonists of the present invention may be useful in preventing, detecting, diagnosing, prognosticating, treating and/or ameliorating autoimmune disorders. Many autoimmune disorders result from inappropriate recognition of self as foreign material by immune cells. This inappropriate recognition results in an immune response leading to the destruction of the host tissue. Therefore, the administration of polynucleotides and polypeptides of the invention that can inhibit an immune response, particularly the proliferation, differentiation, or chemotaxis of T-cells, may be an effective therapy in preventing autoimmune disorders.

[0538] Autoimmune diseases or disorders that may be prevented, detected, diagnosed, prognosticated, treated, and/or ameliorated by polynucleotides, polypeptides, antibodies, and/or agonists or antagonists of the present invention include, but are not limited to, one or more of the following: systemic lupus erythematosus, rheumatoid arthritis, ankylosing spondylitis, multiple sclerosis, autoimmune thyroiditis, Hashimoto's thyroiditis, autoimmune hemolytic anemia, hemolytic anemia, thrombocytopenia, autoimmune thrombocytopenia purpura, autoimmune neonatal thrombocytopenia, idiopathic thrombocytopenia purpura, purpura (e.g., Henloch-Scoenlein purpura), autoimmunocytopenia, Goodpasture's syndrome, Pemphigus vulgaris, myasthenia gravis, Grave's disease (hyperthyroidism), and insulin-resistant diabetes mellitus.

[0539] Additional disorders that are likely to have an autoimmune component that may be prevented, detected, diagnosed, prognosticated, treated and/or ameliorated with the compositions of the invention include, but are not limited to, type II collagen-induced arthritis, antiphospholipid syndrome, dermatitis, allergic encephalomyelitis, myocarditis, relapsing polychondritis, rheumatic heart disease, neuritis, uveitis ophthalmia, polyendocrinopathies, Reiter's Disease, Stiff-Man Syndrome, autoimmune pulmonary inflammation, autism, Guillain-Barre Syndrome, insulin dependent diabetes mellitus, and autoimmune inflammatory eye disorders.

[0540] Additional disorders that are likely to have an autoimmune component that may be prevented, detected, diagnosed, prognosticated, treated and/or ameliorated with the compositions of the invention include, but are not limited to, scleroderma with anti-collagen antibodies (often characterized, e.g., by nucleolar and other nuclear antibodies), mixed connective tissue disease (often characterized, e.g., by antibodies to extractable nuclear antigens (e.g., ribonucleoprotein)), polymyositis (often characterized, e.g., by nonhistone ANA), pernicious anemia (often characterized, e.g., by antiparietal cell, microsomes, and intrinsic factor antibodies), idiopathic Addison's disease (often characterized, e.g., by humoral and cell-mediated adrenal cytotoxicity, infertility (often characterized, e.g., by antispermatozoal antibodies), glomerulonephritis (often characterized, e.g., by glomerular basement membrane antibodies or immune complexes), bullous pemphigoid (often characterized, e.g., by IgG and complement in basement membrane), Sjogren's syndrome (often characterized, e.g., by multiple tissue antibodies, and/or a specific nonhistone ANA (SS-B)), diabetes mellitus (often characterized, e.g., by cell-mediated and humoral islet cell antibodies), and adrenergic drug resistance (including adrenergic drug resistance with asthma or cystic fibrosis) (often characterized, e.g., by beta-adrenergic receptor antibodies).

[0541] Additional disorders that may have an autoimmune component that may be prevented, detected, diagnosed, prognosticated, treated and/or ameliorated with the compositions of the invention include, but are not limited to, chronic active hepatitis (often characterized, e.g., by smooth muscle antibodies), primary biliary cirrhosis (often characterized, e.g., by mitochondria antibodies), other endocrine gland failure (often characterized, e.g., by specific tissue antibodies in some cases), vitiligo (often characterized, e.g., by melanocyte antibodies), vasculitis (often characterized, e.g., by Ig and complement in vessel walls and/or low serum complement), post-MI (often characterized, e.g., by myocardial antibodies), cardiotomy syndrome (often characterized, e.g., by myocardial antibodies), urticaria (often characterized, e.g., by IgG and IgM antibodies to IgE), atopic dermatitis (often characterized, e.g., by IgG and IgM antibodies to IgE), asthma (often characterized, e.g., by IgG and IgM antibodies to IgE), and many other inflammatory, granulomatous, degenerative, and atrophic disorders.

[0542] In a preferred embodiment, the autoimmune diseases and disorders and/or conditions associated with the diseases and disorders recited above are prevented, detected, diagnosed, prognosticated, treated and/or ameliorated using for example, antagonists or agonists, polypeptides or polynucleotides, or antibodies of the present invention. In a specific preferred embodiment, rheumatoid arthritis is prevented, detected, diagnosed, prognosticated, treated and/or ameliorated using polynucleotides, polypeptides, antibodies, and/or agonists or antagonists of the present invention.

[0543] In another specific preferred embodiment, systemic lupus erythematosus is prevented, detected, diagnosed, prognosticated, treated and/or ameliorated using polynucleotides, polypeptides, antibodies, and/or agonists or antagonists of the present invention. In another specific preferred embodiment, idiopathic thrombocytopenia purpura is prevented, detected, diagnosed, prognosticated, treated and/or ameliorated using polynucleotides, polypeptides, antibodies, and/or agonists or antagonists of the present invention.

[0544] In another specific preferred embodiment IgA nephropathy is prevented, detected, diagnosed, prognosticated, treated and/or ameliorated using polynucleotides, polypeptides, antibodies, and/or agonists or antagonists of the present invention.

[0545] In a preferred embodiment, the autoimmune diseases and disorders and/or conditions associated with the diseases and disorders recited above are prevented, detected, diagnosed, prognosticated, treated and/or ameliorated using polynucleotides, polypeptides, antibodies, and/or agonists or antagonists of the present invention

[0546] In preferred embodiments, polypeptides, antibodies, polynucleotides and/or agonists or antagonists of the present invention are used as a immunosuppressive agent(s).

[0547] Polynucleotides, polypeptides, antibodies, and/or agonists or antagonists of the present invention may be useful in detecting, preventing, diagnosing, prognosticating, treating, and/or ameliorating diseases, disorders, and/or conditions of hematopoietic cells. Polynucleotides, polypeptides, antibodies, and/or agonists or antagonists of the present invention could be used to increase differentiation and proliferation of hematopoietic cells, including the pluripotent stem cells, in an effort to treat or prevent those diseases, disorders, and/or conditions associated with a decrease in certain (or many) types hematopoietic cells, including but not limited to, leukopenia, neutropenia, anemia, and thrombocytopenia. Alternatively, Polynucleotides, polypeptides, antibodies, and/or agonists or antagonists of the present invention could be used to increase differentiation and proliferation of hematopoictic cells, including the pluripotent stem cells, in an effort to treat or prevent those diseases, disorders, and/or conditions associated with an increase in certain (or many) types of hematopoietic cells, including but not limited to, histiocytosis.

[0548] Allergic reactions and conditions, such as asthma (particularly allergic asthma) or other respiratory problems, may also be detected, prevented, diagnosed, prognosticated, treated, and/or ameliorated using polypeptides, antibodies, or polynucleotides of the invention, and/or agonists or antagonists thereof. Moreover, these molecules can be used to treat, prevent, prognose, and/or diagnose anaphylaxis, hypersensitivity to an antigenic molecule, or blood group incompatibility.

[0549] Additionally, polypeptides or polynucleotides of the invention, and/or agonists or antagonists thereof, may be used to detect, prevent, diagnose, prognosticate, treat, and/or ameliorate IgE-mediated allergic reactions. Such allergic reactions include, but are not limited to, asthma, rhinitis, and eczema. In specific embodiments, polynucleotides, polypeptides, antibodies, and/or agonists or antagonists of the present invention may be used to modulate IgE concentrations in vitro or in vivo.

[0550] Moreover, polynucleotides, polypeptides, antibodies, and/or agonists or antagonists of the present invention have uses in the detection, prevention, diagnosis, prognostication, treatment, and/or amelioration of inflammatory conditions. For example, since polypeptides, antibodies, or polynucleotides of the invention, and/or agonists or antagonists of the invention may inhibit the activation, proliferation and/or differentiation of cells involved in an inflammatory response, these molecules can be used to prevent and/or treat chronic and acute inflammatory conditions. Such inflammatory conditions include, but are not limited to, for example, inflammation associated with infection (e.g., septic shock, sepsis, or systemic inflammatory response syndrome), ischemia-reperfusion injury, endotoxin lethality, complement-mediated hyperacute rejection, nephritis, cytokine or chemokine induced lung injury, inflammatory bowel disease, Crohn's disease, over production of cytokines (e.g., TNF or IL-1.), respiratory disorders (e.g., asthma and allergy); gastrointestinal disorders (e.g., inflammatory bowel disease); cancers (e.g., gastric, ovarian, lung, bladder, liver, and breast); CNS disorders (e.g., multiple sclerosis; ischemic brain injury and/or stroke, traumatic brain injury, neurodegenerative disorders (e.g., Parkinson's disease and Alzheimer's disease); AIDS-related dementia; and prion disease); cardiovascular disorders (e.g., atherosclerosis, myocarditis, cardiovascular disease, and cardiopulmonary bypass complications); as well as many additional diseases, conditions, and disorders that are characterized by inflammation (e.g., hepatitis, rheumatoid arthritis, gout, trauma, pancreatitis, sarcoidosis, dermatitis, renal ischemia-reperfusion injury, Grave's disease, systemic lupus erythematosus, diabetes mellitus, and allogenic transplant rejection).

[0551] Because inflammation is a fundamental defense mechanism, inflammatory disorders can affect virtually any tissue of the body. Accordingly, polynucleotides, polypeptides, and antibodies of the invention, as well as agonists or antagonists thereof, have uses in the treatment of tissue-specific inflammatory disorders, including, but not limited to, adrenalitis, alveolitis, angiocholecystitis, appendicitis, balanitis, blepharitis, bronchitis, bursitis, carditis, cellulitis, cervicitis, cholecystitis, chorditis, cochlitis, colitis, conjunctivitis, cystitis, dermatitis, diverticulitis, encephalitis, endocarditis, esophagitis, eustachitis, fibrositis, folliculitis, gastritis, gastroenteritis, gingivitis, glossitis, hepatosplenitis, keratitis, labyrinthitis, laryngitis, lymphangitis, mastitis, media otitis, meningitis, metritis, mucitis, myocarditis, myosititis, myringitis, nephritis, neuritis, orchitis, osteochondritis, otitis, pericarditis, peritendonitis, peritonitis, pharyngitis, phlebitis, poliomyelitis, prostatitis, pulpitis, retinitis, rhinitis, salpingitis, scleritis, sclerochoroiditis, scrotitis, sinusitis, spondylitis, steatitis, stomatitis, synovitis, syringitis, tendonitis, tonsillitis, urethritis, and vaginitis.

[0552] In specific embodiments, polypeptides, antibodies, or polynucleotides of the invention, and/or agonists or antagonists thereof, are useful to detect, prevent, diagnose, prognosticate, treat, and/or ameliorate organ transplant rejections and graft-versus-host disease. Organ rejection occurs by host immune cell destruction of the transplanted tissue through an immune response. Similarly, an immune response is also involved in GVHD, but, in this case, the foreign transplanted immune cells destroy the host tissues. Polypeptides, antibodies, or polynucleotides of the invention, and/or agonists or antagonists thereof, that inhibit an immune response, particularly the activation, proliferation, differentiation, or chemotaxis of T-cells, may be an effective therapy in preventing organ rejection or GVHD. In specific embodiments, polypeptides, antibodies, or polynucleotides of the invention, and/or agonists or antagonists thereof, that inhibit an immune response, particularly the activation, proliferation, differentiation, or chemotaxis of T-cells, may be an effective therapy in preventing experimental allergic and hyperacute xenograft rejection.

[0553] In other embodiments, polypeptides, antibodies, or polynucleotides of the invention, and/or agonists or antagonists thereof, are useful to detect, prevent, diagnose, prognosticate, treat, and/or ameliorate immune complex diseases, including, but not limited to, serum sickness, post streptococcal glomerulonephritis, polyarteritis nodosa, and immune complex-induced vasculitis.

[0554] Polypeptides, antibodies, polynucleotides and/or agonists or antagonists of the invention can be used to treat, detect, and/or prevent infectious agents. For example, by increasing the immune response, particularly increasing the proliferation activation and/or differentiation of B and/or T cells, infectious diseases may be treated, detected, and/or prevented. The immune response may be increased by either enhancing an existing immune response, or by initiating a new immune response. Alternatively, polynucleotides, polypeptides, antibodies, and/or agonists or antagonists of the present invention may also directly inhibit the infectious agent (refer to section of application listing infectious agents, etc), without necessarily eliciting an immune response.

[0555] In another embodiment, polypeptides, antibodies, polynucleotides and/or agonists or antagonists of the present invention are used as a vaccine adjuvant that enhances immune responsiveness to an antigen. In a specific embodiment, polypeptides, antibodies, polynucleotides and/or agonists or antagonists of the present invention are used as an adjuvant to enhance tumor-specific immune responses.

[0556] In another specific embodiment, polypeptides, antibodies, polynucleotides and/or agonists or antagonists of the present invention are used as an adjuvant to enhance anti-viral immune responses. Anti-viral immune responses that may be enhanced using the compositions of the invention as an adjuvant, include virus and virus associated diseases or symptoms described herein or otherwise known in the art. In specific embodiments, the compositions of the invention are used as an adjuvant to enhance an immune response to a virus, disease, or symptom selected from the group consisting of: AIDS, meningitis, Dengue, EBV, and hepatitis (e.g., hepatitis B). In another specific embodiment, the compositions of the invention are used as an adjuvant to enhance an immune response to a virus, disease, or symptom selected from the group consisting of HIV/AIDS, respiratory syncytial virus, Dengue, rotavirus, Japanese B encephalitis, influenza A and B, parainfluenza, measles, cytomegalovirus, rabies, Junin, Chikungunya, Rift Valley Fever, herpes simplex, and yellow fever.

[0557] In another specific embodiment, polypeptides, antibodies, polynucleotides and/or agonists or antagonists of the present invention are used as an adjuvant to enhance anti-bacterial or anti-fungal immune responses. Anti-bacterial or anti-fungal immune responses that may be enhanced using the compositions of the invention as an adjuvant, include bacteria or fungus and bacteria or fungus associated diseases or symptoms described herein or otherwise known in the art. In specific embodiments, the compositions of the invention are used as an adjuvant to enhance an immune response to a bacteria or fungus, disease, or symptom selected from the group consisting of: tetanus, Diphtheria, botulism, and meningitis type B.

[0558] In another specific embodiment, the compositions of the invention are used as an adjuvant to enhance an immune response to a bacteria or fungus, disease, or symptom selected from the group consisting of: Vibrio cholerae, Mycobacterium leprae, Salmonella typhi, Salmonella paratyphi, Meisseria meningitidis, Streptococcus pneumoniae, Group B streptococcus, Shigella spp., Enterotoxigenic Escherichia coli, Enterohemorrhagic E. coli, and Borrelia burgdorferi.

[0559] In another specific embodiment, polypeptides, antibodies, polynucleotides and/or agonists or antagonists of the present invention are used as an adjuvant to enhance anti-parasitic immune responses. Anti-parasitic immune responses that may be enhanced using the compositions of the invention as an adjuvant, include parasite and parasite associated diseases or symptoms described herein or otherwise known in the art. In specific embodiments, the compositions of the invention are used as an adjuvant to enhance an immune response to a parasite. In another specific embodiment, the compositions of the invention are used as an adjuvant to enhance an immune response to Plasmodium (malaria) or Leishmania.

[0560] In another specific embodiment, polypeptides, antibodies, polynucleotides and/or agonists or antagonists of the present invention may also be employed to treat infectious diseases including silicosis, sarcoidosis, and idiopathic pulmonary fibrosis; for example, by preventing the recruitment and activation of mononuclear phagocytes.

[0561] In another specific embodiment, polypeptides, antibodies, polynucleotides and/or agonists or antagonists of the present invention are used as an antigen for the generation of antibodies to inhibit or enhance immune mediated responses against polypeptides of the invention.

[0562] In one embodiment, polypeptides, antibodies, polynucleotides and/or agonists or antagonists of the present invention are administered to an animal (e.g., mouse, rat, rabbit, hamster, guinea pig, pigs, micro-pig, chicken, camel, goat, horse, cow, sheep, dog, cat, non-human primate, and human, most preferably human) to boost the immune system to produce increased quantities of one or more antibodies (e.g., IgG, IgA, IgM, and IgE), to induce higher affinity antibody production and immunoglobulin class switching (e.g., IgG, IgA, IgM, and IgE), and/or to increase an immune response.

[0563] In another specific embodiment, polypeptides, antibodies, polynucleotides and/or agonists or antagonists of the present invention are used as a stimulator of B cell responsiveness to pathogens.

[0564] In another specific embodiment, polypeptides, antibodies, polynucleotides and/or agonists or antagonists of the present invention are used as an activator of T cells.

[0565] In another specific embodiment, polypeptides, antibodies, polynucleotides and/or agonists or antagonists of the present invention are used as an agent that elevates the immune status of an individual prior to their receipt of immunosuppressive therapies.

[0566] In another specific embodiment, polypeptides, antibodies, polynucleotides and/or agonists or antagonists of the present invention are used as an agent to induce higher affinity antibodies.

[0567] In another specific embodiment, polypeptides, antibodies, polynucleotides and/or agonists or antagonists of the present invention are used as an agent to increase serum immunoglobulin concentrations.

[0568] In another specific embodiment, polypeptides, antibodies, polynucleotides and/or agonists or antagonists of the present invention are used as an agent to accelerate recovery of immunocompromised individuals.

[0569] In another specific embodiment, polypeptides, antibodies, polynucleotides and/or agonists or antagonists of the present invention are used as an agent to boost immunoresponsiveness among aged populations and/or neonates.

[0570] In another specific embodiment, polypeptides, antibodies, polynucleotides and/or agonists or antagonists of the present invention are used as an immune system enhancer prior to, during, or after bone marrow transplant and/or other transplants (e.g., allogeneic or xenogeneic organ transplantation). With respect to transplantation, compositions of the invention may be administered prior to, concomitant with, and/or after transplantation. In a specific embodiment, compositions of the invention are administered after transplantation, prior to the beginning of recovery of T-cell populations. In another specific embodiment, compositions of the invention are first administered after transplantation after the beginning of recovery of T cell populations, but prior to full recovery of B cell populations.

[0571] In another specific embodiment, polypeptides, antibodies, polynucleotides and/or agonists or antagonists of the present invention are used as an agent to boost immunoresponsiveness among individuals having an acquired loss of B cell function. Conditions resulting in an acquired loss of B cell function that may be ameliorated or treated by administering the polypeptides, antibodies, polynucleotides and/or agonists or antagonists thereof, include, but are not limited to, HIV Infection, AIDS, bone marrow transplant, and B cell chronic lymphocytic leukemia (CLL).

[0572] In another specific embodiment, polypeptides, antibodies, polynucleotides and/or agonists or antagonists of the present invention are used as an agent to boost immunoresponsiveness among individuals having a temporary immune deficiency. Conditions resulting in a temporary immune deficiency that may be ameliorated or treated by administering the polypeptides, antibodies, polynucleotides and/or agonists or antagonists thereof, include, but are not limited to, recovery from viral infections (e.g., influenza), conditions associated with malnutrition, recovery from infectious mononucleosis, or conditions associated with stress, recovery from measles, recovery from blood transfusion, and recovery from surgery.

[0573] In another specific embodiment, polypeptides, antibodies, polynucleotides and/or agonists or antagonists of the present invention are used as a regulator of antigen presentation by monocytes, dendritic cells, and/or B-cells. In one embodiment, polynucleotides, polypeptides, antibodies, and/or agonists or antagonists of the present invention enhance antigen presentation or antagonizes antigen presentation in vitro or in vivo. Moreover, in related embodiments, said enhancement or antagonism of antigen presentation may be useful as an anti-tumor treatment or to modulate the immune system.

[0574] In another specific embodiment, polypeptides, antibodies, polynucleotides and/or agonists or antagonists of the present invention are used as an agent to direct an individual's immune system towards development of a humoral response (i.e. TH2) as opposed to a TH1 cellular response.

[0575] In another specific embodiment, polypeptides, antibodies, polynucleotides and/or agonists or antagonists of the present invention are used as a means to induce tumor proliferation and thus make it more susceptible to anti-neoplastic agents. For example, multiple myeloma is a slowly dividing disease and is thus refractory to virtually all anti-neoplastic regimens. If these cells were forced to proliferate more rapidly their susceptibility profile would likely change.

[0576] In another specific embodiment, polypeptides, antibodies, polynucleotides and/or agonists or antagonists of the present invention are used as a stimulator of B cell production in pathologies such as AIDS, chronic lymphocyte disorder and/or Common Variable Immunodificiency.

[0577] In another specific embodiment, polypeptides, antibodies, polynucleotides and/or agonists or antagonists of the present invention are used as a therapy for generation and/or regeneration of lymphoid tissues following surgery, trauma or genetic defect. In another specific embodiment, polypeptides, antibodies, polynucleotides and/or agonists or antagonists of the present invention are used in the pretreatment of bone marrow samples prior to transplant.

[0578] In another specific embodiment, polypeptides, antibodies, polynucleotides and/or agonists or antagonists of the present invention are used as a gene-based therapy for genetically inherited disorders resulting in immuno-incompetence/immunodeficiency such as observed among SCID patients.

[0579] In another specific embodiment, polypeptides, antibodies, polynucleotides and/or agonists or antagonists of the present invention are used as a means of activating monocytes/macrophages to defend against parasitic diseases that effect monocytes such as Leishmania.

[0580] In another specific embodiment, polypeptides, antibodies, polynucleotides and/or agonists or antagonists of the present invention are used as a means of regulating secreted cytokines that are elicited by polypeptides of the invention.

[0581] In another embodiment, polypeptides, antibodies, polynucleotides and/or agonists or antagonists of the present invention are used in one or more of the applications decribed herein, as they may apply to veterinary medicine.

[0582] In another specific embodiment, polypeptides, antibodies, polynucleotides and/or agonists or antagonists of the present invention are used as a means of blocking various aspects of immune responses to foreign agents or self. Examples of diseases or conditions in which blocking of certain aspects of immune responses may be desired include autoimmune disorders such as lupus, and arthritis, as well as immunoresponsiveness to skin allergies, inflammation, bowel disease, injury and diseases/disorders associated with pathogens.

[0583] In another specific embodiment, polypeptides, antibodies, polynucleotides and/or agonists or antagonists of the present invention are used as a therapy for preventing the B cell proliferation and Ig secretion associated with autoimmune diseases such as idiopathic thrombocytopenic purpura, systemic lupus erythematosus and multiple sclerosis.

[0584] In another specific embodiment, polypeptides, antibodies, polynucleotides and/or agonists or antagonists of the present invention are used as a inhibitor of B and/or T cell migration in endothelial cells. This activity disrupts tissue architecture or cognate responses and is useful, for example in disrupting immune responses, and blocking sepsis.

[0585] In another specific embodiment, polypeptides, antibodies, polynucleotides and/or agonists or antagonists of the present invention are used as a therapy for chronic hypergammaglobulinemia evident in such diseases as monoclonal gammopathy of undetermined significance (MGUS), Waldenstrom's disease, related idiopathic monoclonal gammopathies, and plasmacytomas.

[0586] In another specific embodiment, polypeptides, antibodies, polynucleotides and/or agonists or antagonists of the present invention may be employed for instance to inhibit polypeptide chemotaxis and activation of macrophages and their precursors, and of neutrophils, basophils, B lymphocytes and some T-cell subsets, e.g., activated and CD8 cytotoxic T cells and natural killer cells, in certain autoimmune and chronic inflammatory and infective diseases. Examples of autoimmune diseases are described herein and include multiple sclerosis, and insulin-dependent diabetes.

[0587] The polypeptides, antibodies, polynucleotides and/or agonists or antagonists of the present invention may also be employed to treat idiopathic hyper-eosinophilic syndrome by, for example, preventing eosinophil production and migration.

[0588] In another specific embodiment, polypeptides, antibodies, polynucleotides and/or agonists or antagonists of the present invention are used to enhance or inhibit complement mediated cell lysis.

[0589] In another specific embodiment, polypeptides, antibodies, polynucleotides and/or agonists or antagonists of the present invention are used to enhance or inhibit antibody dependent cellular cytotoxicity.

[0590] In another specific embodiment, polypeptides, antibodies, polynucleotides and/or agonists or antagonists of the present invention may also be employed for treating atherosclerosis, for example, by preventing monocyte infiltration in the artery wall.

[0591] In another specific embodiment, polypeptides, antibodies, polynucleotides and/or agonists or antagonists of the present invention may be employed to treat adult respiratory distress syndrome (ARDS).

[0592] In another specific embodiment, polypeptides, antibodies, polynucleotides and/or agonists or antagonists of the present invention may be useful for stimulating wound and tissue repair, stimulating angiogenesis, and/or stimulating the repair of vascular or lymphatic diseases or disorders. Additionally, agonists and antagonists of the invention may be used to stimulate the regeneration of mucosal surfaces.

[0593] In a specific embodiment, polynucleotides or polypeptides, and/or agonists thereof are used to detect, prevent, diagnose, prognosticate, treat, and/or ameliorate a disorder characterized by primary or acquired immunodeficiency, deficient serum immunoglobulin production, recurrent infections, and/or immune system dysfunction. Moreover, polynucleotides or polypeptides, and/or agonists thereof may be used to treat or prevent infections of the joints, bones, skin, and/or parotid glands, blood-borne infections (e.g., sepsis, meningitis, septic arthritis, and/or osteomyelitis), autoimmune diseases (e.g., those disclosed herein), inflammatory disorders, and malignancies, and/or any disease or disorder or condition associated with these infections, diseases, disorders and/or malignancies) including, but not limited to, CVID, other primary immune deficiencies, HIV disease, CLL, recurrent bronchitis, sinusitis, otitis media, conjunctivitis, pneumonia, hepatitis, meningitis, herpes zoster (e.g., severe herpes zoster), and/or pneumocystis carnii. Other diseases and disorders that may be detected, prevented, diagnosed, prognosticated, treated, and/or ameliorated with polynucleotides or polypeptides, and/or agonists of the present invention include, but are not limited to, HIV infection, HTLV-BLV infection, lymphopenia, phagocyte bactericidal dysfunction anemia, thrombocytopenia, and hemoglobinuria.

[0594] In another embodiment, polynucleotides, polypeptides, antibodies, and/or agonists or antagonists of the present invention are used to treat, and/or diagnose an individual having common variable immunodeficiency disease (“CVID”; also known as “acquired agammaglobulinemia” and “acquired hypogammaglobulinemia”) or a subset of this disease.

[0595] In a specific embodiment, polynucleotides, polypeptides, antibodies, and/or agonists or antagonists of the present invention may be used to detect, prevent, diagnose, prognosticate, treat, and/or ameliorate cancers or neoplasms including immune cell or immune tissue-related cancers or neoplasms. Examples of cancers or neoplasms that may be detected, prevented, diagnosed, prognosticated, treated, and/or ameliorated by polynucleotides, polypeptides, antibodies, and/or agonists or antagonists of the present invention include, but are not limited to, acute myelogenous leukemia, chronic myelogenous leukemia, Hodgkin's disease, non-Hodgkin's lymphoma, acute lymphocytic anemia (ALL) Chronic lymphocyte leukemia, plasmacytomas, multiple myeloma, Burkitt's lymphoma, EBV-transformed diseases, and/or diseases and disorders described in the section entitled “Hyperproliferative Disorders” elsewhere herein.

[0596] In another specific embodiment, polypeptides, antibodies, polynucleotides and/or agonists or antagonists of the present invention are used as a therapy for decreasing cellular proliferation of Large B-cell Lymphomas.

[0597] In another specific embodiment, polypeptides, antibodies, polynucleotides and/or agonists or antagonists of the present invention are used as a means of decreasing the involvement of B cells and Ig associated with Chronic Myelogenous Leukemia

[0598] In specific embodiments, the compositions of the invention are used as an agent to boost immunoresponsiveness among B cell immunodeficient individuals, such as, for example, an individual who has undergone a partial or complete splenectomy.

[0599] Antagonists of the invention include, for example, binding and/or inhibitory antibodies, antisense nucleic acids, ribozymes or soluble forms of the polypeptides of the present invention (e.g., Fc fusion protein; see, e.g., Example 9). Agonists of the invention include, for example, binding or stimulatory antibodies, and soluble forms of the polypeptides (e.g., Fc fusion proteins; see, e.g., Example 9), polypeptides, antibodies, polynucleotides and/or agonists or antagonists of the present invention may be employed in a composition with a pharmaceutically acceptable carrier, e.g., as described herein.

[0600] In another embodiment, polypeptides, antibodies, polynucleotides and/or agonists or antagonists of the present invention are administered to an animal (including, but not limited to, those listed above, and also including transgenic animals) incapable of producing functional endogenous antibody molecules or having an otherwise compromised endogenous immune system, but which is capable of producing human immunoglobulin molecules by means of a reconstituted or partially reconstituted immune system from another animal (see, e.g., published PCT Application Nos. WO98/24893, WO/9634096, WO/9633735, and WO/9110741). Administration of polypeptides, antibodies, polynucleotides and/or agonists or antagonists of the present invention to such animals is useful for the generation of monoclonal antibodies against the polypeptides, antibodies, polynucleotides and/or agonists or antagonists of the present invention.

Respiratory Disorders

[0601] Polynucleotides or polypeptides, or agonists or antagonists of the present invention may be used to detect, prevent, diagnose, prognosticate, treat, and/or ameliorate diseases and/or disorders of the respiratory system.

[0602] Diseases and disorders of the respiratory system include, but are not limited to, nasal vestibulitis, nonallergic rhinitis (e.g., acute rhinitis, chronic rhinitis, atrophic rhinitis, vasomotor rhinitis), nasal polyps, and sinusitis, juvenile angiofibromas, cancer of the nose and juvenile papillomas, vocal cord polyps, nodules (singer's nodules), contact ulcers, vocal cord paralysis, laryngoceles, pharyngitis (e.g., viral and bacterial), tonsillitis, tonsillar cellulitis, parapharyngeal abscess, laryngitis, laryngoceles, and throat cancers (e.g., cancer of the nasopharynx, tonsil cancer, larynx cancer), lung cancer (e.g., squamous cell carcinoma, small cell (oat cell) carcinoma, large cell carcinoma, and adenocarcinoma), allergic disorders (eosinophilic pneumonia, hypersensitivity pneumonitis (e.g., extrinsic allergic alveolitis, allergic interstitial pneumonitis, organic dust pneumoconiosis, allergic bronchopulmonary aspergillosis, asthma, Wegener's granulomatosis (granulomatous vasculitis), Goodpasture's syndrome)), pneumonia (e.g., bacterial pneumonia (e.g., Streptococcus pneumoniae (pneumoncoccal pneumonia), Staphylococcus aureus (staphylococcal pneumonia), Gram-negative bacterial pneumonia (caused by, e.g., Klebsiella and Pseudomas spp.), Mycoplasma pneumoniae pneumonia, Hemophilus influenzae pneumonia, Legionella pneumophila (Legionnaires' disease), and Chlamydia psittaci (Psittacosis)), and viral pneumonia (e.g., influenza, chickenpox (varicella).

[0603] Additional diseases and disorders of the respiratory system include, but are not limited to bronchiolitis, polio (poliomyelitis), croup, respiratory syncytial viral infection, mumps, erythema infectiosum (fifth disease), roseola infantum, progressive rubella panencephalitis, german measles, and subacute sclerosing panencephalitis), fungal pneumonia (e.g., Histoplasmosis, Coccidioidomycosis, Blastomycosis, fungal infections in people with severely suppressed immune systems (e.g., cryptococcosis, caused by Cryptococcus neoformans; aspergillosis, caused by Aspergillus spp.; candidiasis, caused by Candida; and mucormycosis)), Pneumocystis carinii (pneumocystis pneumonia), atypical pneumonias (e.g., Mycoplasma and Chlamydia spp.), opportunistic infection pneumonia, nosocomial pneumonia, chemical pneumonitis, and aspiration pneumonia, pleural disorders (e.g., pleurisy, pleural effusion, and pneumothorax (e.g., simple spontaneous pneumothorax, complicated spontaneous pneumothorax, tension pneumothorax)), obstructive airway diseases (e.g., asthma, chronic obstructive pulmonary disease (COPD), emphysema, chronic or acute bronchitis), occupational lung diseases (e.g., silicosis, black lung (coal workers' pneumoconiosis), asbestosis, berylliosis, occupational asthsma, byssinosis, and benign pneumoconioses), Infiltrative Lung Disease (e.g., pulmonary fibrosis (e.g., fibrosing alveolitis, usual interstitial pneumonia), idiopathic pulmonary fibrosis, desquamative interstitial pneumonia, lymphoid interstitial pneumonia, histiocytosis X (e.g., Letterer-Siwe disease, Hand-Schüller-Christian disease, eosinophilic granuloma), idiopathic pulmonary hemosiderosis, sarcoidosis and pulmonary alveolar proteinosis), Acute respiratory distress syndrome (also called, e.g., adult respiratory distress syndrome), edema, pulmonary embolism, bronchitis (e.g., viral, bacterial), bronchiectasis, atelectasis, lung abscess (caused by, e.g., Staphylococcus aureus or Legionella pneumophila), and cystic fibrosis.

Wound Healing and Epithelial Cell Proliferation

[0604] In accordance with yet a further aspect of the present invention, there is provided a process for utilizing polynucleotides or polypeptides, as well as agonists or antagonists of the present invention, for therapeutic purposes, for example, to stimulate epithelial cell proliferation and basal keratinocytes for the purpose of wound healing, and to stimulate hair follicle production and healing of dermal wounds. Polynucleotides or polypeptides, as well as agonists or antagonists of the present invention, may be clinically useful in stimulating wound healing including surgical wounds, excisional wounds, deep wounds involving damage of the dermis and epidermis, eye tissue wounds, dental tissue wounds, oral cavity wounds, diabetic ulcers, dermal ulcers, cubitus ulcers, arterial ulcers, venous stasis ulcers, burns resulting from heat exposure or chemicals, and other abnormal wound healing conditions such as uremia, malnutrition, vitamin deficiencies and complications associated with systemic treatment with steroids, radiation therapy and antineoplastic drugs and antimetabolites. Polynucleotides or polypeptides, as well as agonists or antagonists of the present invention, could be used to promote dermal reestablishment subsequent to dermal loss

[0605] Polynucleotides or polypeptides, as well as agonists or antagonists of the present invention, could be used to increase the adherence of skin grafts to a wound bed and to stimulate re-epithelialization from the wound bed. The following are types of grafts that polynucleotides or polypeptides, agonists or antagonists of the present invention, could be used to increase adherence to a wound bed: autografts, artificial skin, allografts, autodermic graft, autoepdermic grafts, avacular grafts, Blair-Brown grafts, bone graft, brephoplastic grafts, cutis graft, delayed graft, dermic graft, epidermic graft, fascia graft, full thickness graft, heterologous graft, xenograft, homologous graft, hyperplastic graft, lamellar graft, mesh graft, mucosal graft, Ollier-Thiersch graft, omenpal graft, patch graft, pedicle graft, penetrating graft, split skin graft, thick split graft. Polynucleotides or polypeptides, as well as agonists or antagonists of the present invention, can be used to promote skin strength and to improve the appearance of aged skin.

[0606] It is believed that polynucleotides or polypeptides, as well as agonists or antagonists of the present invention, will also produce changes in hepatocyte proliferation, and epithelial cell proliferation in the lung, breast, pancreas, stomach, small intestine, and large intestine. Polynucleotides or polypeptides, as well as agonists or antagonists of the present invention, could promote proliferation of epithelial cells such as sebocytes, hair follicles, hepatocytes, type II pneumocytes, mucin-producing goblet cells, and other epithelial cells and their progenitors contained within the skin, lung, liver, and gastrointestinal tract. Polynucleotides or polypeptides, agonists or antagonists of the present invention, may promote proliferation of endothelial cells, keratinocytes, and basal keratinocytes.

[0607] Polynucleotides or polypeptides, as well as agonists or antagonists of the present invention, could also be used to reduce the side effects of gut toxicity that result from radiation, chemotherapy treatments or viral infections. Polynucleotides or polypeptides, as well as agonists or antagonists of the present invention, may have a cytoprotective effect on the small intestine mucosa. Polynucleotides or polypeptides, as well as agonists or antagonists of the present invention, may also stimulate healing of mucositis (mouth ulcers) that result from chemotherapy and viral infections.

[0608] Polynucleotides or polypeptides, as well as agonists or antagonists of the present invention, could further be used in full regeneration of skin in full and partial thickness skin defects, including burns, (i.e., repopulation of hair follicles, sweat glands, and sebaceous glands), treatment of other skin defects such as psoriasis. Polynucleotides or polypeptides, as well as agonists or antagonists of the present invention, could be used to treat epidermolysis bullosa, a defect in adherence of the epidermis to the underlying dermis which results in frequent, open and painful blisters by accelerating reepithelialization of these lesions. Polynucleotides or polypeptides, as well as agonists or antagonists of the present invention, could also be used to treat gastric and doudenal ulcers and help heal by scar formation of the mucosal lining and regeneration of glandular mucosa and duodenal mucosal lining more rapidly. Inflammatory bowel diseases, such as Crohn's disease and ulcerative colitis, are diseases which result in destruction of the mucosal surface of the small or large intestine, respectively. Thus, polynucleotides or polypeptides, as well as agonists or antagonists of the present invention, could be used to promote the resurfacing of the mucosal surface to aid more rapid healing and to prevent progression of inflammatory bowel disease. Treatment with polynucleotides or polypeptides, agonists or antagonists of the present invention, is expected to have a significant effect on the production of mucus throughout the gastrointestinal tract and could be used to protect the intestinal mucosa from injurious substances that are ingested or following surgery. Polynucleotides or polypeptides, as well as agonists or antagonists of the present invention, could be used to treat diseases associate with the under expression.

[0609] Moreover, polynucleotides or polypeptides, as well as agonists or antagonists of the present invention, could be used to prevent and heal damage to the lungs due to various pathological states. Polynucleotides or polypeptides, as well as agonists or antagonists of the present invention, which could stimulate proliferation and differentiation and promote the repair of alveoli and brochiolar epithelium to prevent or treat acute or chronic lung damage. For example, emphysema, which results in the progressive loss of aveoli, and inhalation injuries, i.e., resulting from smoke inhalation and burns, that cause necrosis of the bronchiolar epithelium and alveoli could be effectively treated using polynucleotides or polypeptides, agonists or antagonists of the present invention. Also, polynucleotides or polypeptides, as well as agonists or antagonists of the present invention, could be used to stimulate the proliferation of and differentiation of type II pneumocytes, which may help treat or prevent disease such as hyaline membrane diseases, such as infant respiratory distress syndrome and bronchopulmonary displasia, in premature infants.

[0610] Polynucleotides or polypeptides, as well as agonists or antagonists of the present invention, could stimulate the proliferation and differentiation of hepatocytes and, thus, could be used to alleviate or treat liver diseases and pathologies such as fulminant liver failure caused by cirrhosis, liver damage caused by viral hepatitis and toxic substances (i.e., acetaminophen, carbon tetraholoride and other hepatotoxins known in the art).

[0611] In addition, polynucleotides or polypeptides, as well as agonists or antagonists of the present invention, could be used treat or prevent the onset of diabetes mellitus. In patients with newly diagnosed Types I and II diabetes, where some islet cell function remains, polynucleotides or polypeptides, as well as agonists or antagonists of the present invention, could be used to maintain the islet function so as to alleviate, delay or prevent permanent manifestation of the disease. Also, polynucleotides or polypeptides, as well as agonists or antagonists of the present invention, could be used as an auxiliary in islet cell transplantation to improve or promote islet cell function.

Gastrointestinal Disorders

[0612] Polynucleotides or polypeptides, or agonists or antagonists of the present invention, may be used to detect, prevent, diagnose, prognosticate, treat, and/or ameliorate gastrointestinal diseases and disorders, including inflammatory diseases and/or conditions, infections, cancers (e.g., intestinal neoplasms (carcinoid tumor of the small intestine, non-Hodgkin's lymphoma of the small intestine, small bowl lymphoma)), and ulcers, such as peptic ulcers.

[0613] Gastrointestinal disorders include dysphagia, odynophagia, inflammation of the esophagus, peptic esophagitis, gastric reflux, submucosal fibrosis and stricturing, Mallory-Weiss lesions, leiomyomas, lipomas, epidermal cancers, adeoncarcinomas, gastric retention disorders, gastroenteritis, gastric atrophy, gastric/stomach cancers, polyps of the stomach, autoimmune disorders such as pernicious anemia, pyloric stenosis, gastritis (bacterial, viral, eosinophilic, stress-induced, chronic erosive, atrophic, plasma cell, and Ménétrier's), and peritoneal diseases (e.g., chyloperioneum, hemoperitoneum, mesenteric cyst, mesenteric lymphadenitis, mesenteric vascular occlusion, panniculitis, neoplasms, peritonitis, pneumoperitoneum, bubphrenic abscess,).

[0614] Gastrointestinal disorders also include disorders associated with the small intestine, such as malabsorption syndromes, distension, irritable bowel syndrome, sugar intolerance, celiac disease, duodenal ulcers, duodenitis, tropical sprue, Whipple's disease, intestinal lymphangiectasia, Crohn's disease, appendicitis, obstructions of the ileum, Meckel's diverticulum, multiple diverticula, failure of complete rotation of the small and large intestine, lymphoma, and bacterial and parasitic diseases (such as Traveler's diarrhea, typhoid and paratyphoid, cholera, infection by Roundworms (Ascariasis lumbricoides), Hookworms (Ancylostoma duodenale), Threadworms (Enterobius vermicularis), Tapeworms (Taenia saginata, Echinococcus granulosus, Diphyllobothrium spp., and T. solium).

[0615] Liver diseases and/or disorders include intrahepatic cholestasis (alagille syndrome, biliary liver cirrhosis), fatty liver (alcoholic fatty liver, reye syndrome), hepatic vein thrombosis, hepatolentricular degeneration, hepatomegaly, hepatopulmonary syndrome, hepatorenal syndrome, portal hypertension (esophageal and gastric varices), liver abscess (amebic liver abscess), liver cirrhosis (alcoholic, biliary and experimental), alcoholic liver diseases (fatty liver, hepatitis, cirrhosis), parasitic (hepatic echinococcosis, fascioliasis, amebic liver abscess), jaundice (hemolytic, hepatocellular, and cholestatic), cholestasis, portal hypertension, liver enlargement, ascites, hepatitis (alcoholic hepatitis, animal hepatitis, chronic hepatitis (autoimmune, hepatitis B, hepatitis C, hepatitis D, drug induced), toxic hepatitis, viral human hepatitis (hepatitis A, hepatitis B, hepatitis C, hepatitis D, hepatitis E), Wilson's disease, granulomatous hepatitis, secondary biliary cirrhosis, hepatic encephalopathy, portal hypertension, varices, hepatic encephalopathy, primary biliary cirrhosis, primary sclerosing cholangitis, hepatocellular adenoma, hemangiomas, bile stones, liver failure (hepatic encephalopathy, acute liver failure), and liver neoplasms (angiomyolipoma, calcified liver metastases, cystic liver metastases, epithelial tumors, fibrolamellar hepatocarcinoma, focal nodular hyperplasia, hepatic adenoma, hepatobiliary cystadenoma, hepatoblastoma, hepatocellular carcinoma, hepatoma, liver cancer, liver hemangioendothelioma, mesenchymal hamartoma, mesenchymal tumors of liver, nodular regenerative hyperplasia, benign liver tumors (Hepatic cysts [Simple cysts, Polycystic liver disease, Hepatobiliary cystadenoma, Choledochal cyst], Mesenchymal tumors [Mesenchymal hamartoma, Infantile hemangioendothelioma, Hemangioma, Peliosis hepatis, Lipomas, Inflammatory pseudotumor, Miscellaneous], Epithelial tumors [Bile duct epithelium (Bile duct hamartoma, Bile duct adenoma), Hepatocyte (Adenoma, Focal nodular hyperplasia, Nodular regenerative hyperplasia)], malignant liver tumors [hepatocellular, hepatoblastoma, hepatocellular carcinoma, cholangiocellular, cholangiocarcinoma, cystadenocarcinoma, tumors of blood vessels, angiosarcoma, Karposi's sarcoma, hemangioendothelioma, other tumors, embryonal sarcoma, fibrosarcoma, leiomyosarcoma, rhabdomyosarcoma, carcinosarcoma, teratoma, carcinoid, squamous carcinoma, primary lymphoma]), peliosis hepatis, erythrohepatic porphyria, hepatic porphyria (acute intermittent porphyria, porphyria cutanea tarda), Zellweger syndrome).

[0616] Pancreatic diseases and/or disorders include acute pancreatitis, chronic pancreatitis (acute necrotizing pancreatitis, alcoholic pancreatitis), neoplasms (adenocarcinoma of the pancreas, cystadenocarcinoma, insulinoma, gastrinoma, and glucagonoma, cystic neoplasms, islet-cell tumors, pancreoblastoma), and other pancreatic diseases (e.g., cystic fibrosis, cyst (pancreatic pseudocyst, pancreatic fistula, insufficiency)).

[0617] Gallbladder diseases include gallstones (cholelithiasis and choledocholithiasis), postcholecystectomy syndrome, diverticulosis of the gallbladder, acute cholecystitis, chronic cholecystitis, bile duct tumors, and mucocele.

[0618] Diseases and/or disorders of the large intestine include antibiotic-associated colitis, diverticulitis, ulcerative colitis, acquired megacolon, abscesses, fungal and bacterial infections, anorectal disorders (e.g., fissures, hemorrhoids), colonic diseases (colitis, colonic neoplasms [colon cancer, adenomatous colon polyps (e.g., villous adenoma), colon carcinoma, colorectal cancer], colonic diverticulitis, colonic diverticulosis, megacolon [Hirschsprung disease, toxic megacolon]; sigmoid diseases [proctocolitis, sigmoin neoplasms]), constipation, Crohn's disease, diarrhea (infantile diarrhea, dysentery), duodenal diseases (duodenal neoplasms, duodenal obstruction, duodenal ulcer, duodenitis), enteritis (enterocolitis), HIV enteropathy, ileal diseases (ileal neoplasms, ileitis), immunoproliferative small intestinal disease, inflammatory bowel disease (ulcerative colitis, Crohn's disease), intestinal atresia, parasitic diseases (anisakiasis, balantidiasis, blastocystis infections, cryptosporidiosis, dientamoebiasis, amebic dysentery, giardiasis), intestinal fistula (rectal fistula), intestinal neoplasms (cecal neoplasms, colonic neoplasms, duodenal neoplasms, ileal neoplasms, intestinal polyps, jejunal neoplasms, rectal neoplasms), intestinal obstruction (afferent loop syndrome, duodenal obstruction, impacted feces, intestinal pseudo-obstruction [cecal volvulus], intussusception), intestinal perforation, intestinal polyps (colonic polyps, gardner syndrome, peutz-jeghers syndrome), jejunal diseases (jejunal neoplasms), malabsorption syndromes (blind loop syndrome, celiac disease, lactose intolerance, short bowl syndrome, tropical sprue, whipple's disease), mesenteric vascular occlusion, pneumatosis cystoides intestinalis, protein-losing enteropathies (intestinal lymphagiectasis), rectal diseases (anus diseases, fecal incontinence, hemorrhoids, proctitis, rectal fistula, rectal prolapse, rectocele), peptic ulcer (duodenal ulcer, peptic esophagitis, hemorrhage, perforation, stomach ulcer, Zollinger-Ellison syndrome), postgastrectomy syndromes (dumping syndrome), stomach diseases (e.g., achlorhydria, duodenogastric reflux (bile reflux), gastric antral vascular ectasia, gastric fistula, gastric outlet obstruction, gastritis (atrophic or hypertrophic), gastroparesis, stomach dilatation, stomach diverticulum, stomach neoplasms (gastric cancer, gastric polyps, gastric adenocarcinoma, hyperplastic gastric polyp), stomach rupture, stomach ulcer, stomach volvulus), tuberculosis, visceroptosis, vomiting (e.g., hematemesis, hyperemesis gravidarum, postoperative nausea and vomiting) and hemorrhagic colitis.

[0619] Further diseases and/or disorders of the gastrointestinal system include biliary tract diseases, such as, gastroschisis, fistula (e.g., biliary fistula, esophageal fistula, gastric fistula, intestinal fistula, pancreatic fistula), neoplasms (e.g., biliary tract neoplasms, esophageal neoplasms, such as adenocarcinoma of the esophagus, esophageal squamous cell carcinoma, gastrointestinal neoplasms, pancreatic neoplasms, such as adenocarcinoma of the pancreas, mucinous cystic neoplasm of the pancreas, pancreatic cystic neoplasms, pancreatoblastoma, and peritoneal neoplasms), esophageal disease (e.g., bullous diseases, candidiasis, glycogenic acanthosis, ulceration, barrett esophagus varices, atresia, cyst, diverticulum (e.g., Zenker's diverticulum), fistula (e.g., tracheoesophageal fistula), motility disorders (e.g., CREST syndrome, deglutition disorders, achalasia, spasm, gastroesophageal reflux), neoplasms, perforation (e.g., Boerhaave syndrome, Mallory-Weiss syndrome), stenosis, esophagitis, diaphragmatic hernia (e.g., hiatal hernia); gastrointestinal diseases, such as, gastroenteritis (e.g., cholera morbus, norwalk virus infection), hemorrhage (e.g., hematemesis, melena, peptic ulcer hemorrhage), stomach neoplasms (gastric cancer, gastric polyps, gastric adenocarcinoma, stomach cancer)), hernia (e.g., congenital diaphragmatic hernia, femoral hernia, inguinal hernia, obturator hernia, umbilical hernia, ventral hernia), and intestinal diseases (e.g., cecal diseases (appendicitis, cecal neoplasms)).

Chemotaxis

[0620] Polynucleotides or polypeptides, as well as agonists or antagonists of the present invention may have chemotaxis activity. A chemotaxic molecule attracts or mobilizes cells (e.g., monocytes, fibroblasts, neutrophils, T-cells, mast cells, eosinophils, epithelial and/or endothelial cells) to a particular site in the body, such as inflammation, infection, or site of hyperproliferation. The mobilized cells can then fight off and/or heal the particular trauma or abnormality.

[0621] Polynucleotides or polypeptides, as well as agonists or antagonists of the present invention may increase chemotaxic activity of particular cells. These chemotactic molecules can then be used to treat inflammation, infection, hyperproliferative disorders, or any immune system disorder by increasing the number of cells targeted to a particular location in the body. For example, chemotaxic molecules can be used to treat wounds and other trauma to tissues by attracting immune cells to the injured location. Chemotactic molecules of the present invention can also attract fibroblasts, which can be used to treat wounds.

[0622] It is also contemplated that polynucleotides or polypeptides, as well as agonists or antagonists of the present invention may inhibit chemotactic activity. These molecules could also be used to treat disorders. Thus, polynucleotides or polypeptides, as well as agonists or antagonists of the present invention could be used as an inhibitor of chemotaxis.

Binding Activity

[0623] A polypeptide of the present invention may be used to screen for molecules that bind to the polypeptide or for molecules to which the polypeptide binds. The binding of the polypeptide and the molecule may activate (agonist), increase, inhibit (antagonist), or decrease activity of the polypeptide or the molecule bound. Examples of such molecules include antibodies, oligonucleotides, proteins (e.g., receptors), or small molecules.

[0624] Preferably, the molecule is closely related to the natural ligand of the polypeptide, e.g., a fragment of the ligand, or a natural substrate, a ligand, a structural or functional mimetic. (See, Coligan et al., Current Protocols in Immunology 1(2):Chapter 5 (1991)). Similarly, the molecule can be closely related to the natural receptor to which the polypeptide binds, or at least, a fragment of the receptor capable of being bound by the polypeptide (e.g., active site). In either case, the molecule can be rationally designed using known techniques.

[0625] Preferably, the screening for these molecules involves producing appropriate cells which express the polypeptide. Preferred cells include cells from mammals, yeast, Drosophila, or E. coli. Cells expressing the polypeptide (or cell membrane containing the expressed polypeptide) are then preferably contacted with a test compound potentially containing the molecule to observe binding, stimulation, or inhibition of activity of either the polypeptide or the molecule.

[0626] The assay may simply test binding of a candidate compound to the polypeptide, wherein binding is detected by a label, or in an assay involving competition with a labeled competitor. Further, the assay may test whether the candidate compound results in a signal generated by binding to the polypeptide.

[0627] Alternatively, the assay can be carried out using cell-free preparations, polypeptide/molecule affixed to a solid support, chemical libraries, or natural product mixtures. The assay may also simply comprise the steps of mixing a candidate compound with a solution containing a polypeptide, measuring polypeptide/molecule activity or binding, and comparing the polypeptide/molecule activity or binding to a standard.

[0628] Preferably, an ELISA assay can measure polypeptide level or activity in a sample (e.g., biological sample) using a monoclonal or polyclonal antibody. The antibody can measure polypeptide level or activity by either binding, directly or indirectly, to the polypeptide or by competing with the polypeptide for a substrate.

[0629] Additionally, the receptor to which the polypeptide of the present invention binds can be identified by numerous methods known to those of skill in the ark for example, ligand panning and FACS sorting (Coligan, et al., Current Protocols in Immun., 1(2), Chapter 5, (1991)). For example, expression cloning is employed wherein polyadenylated RNA is prepared from a cell responsive to the polypeptides, for example, NIH3T3 cells which are known to contain multiple receptors for the FGF family proteins, and SC-3 cells, and a cDNA library created from this RNA is divided into pools and used to transfect COS cells or other cells that are not responsive to the polypeptides. Transfected cells which are grown on glass slides are exposed to the polypeptide of the present invention, after they have been labeled. The polypeptides can be labeled by a variety of means including iodination or inclusion of a recognition site for a site-specific protein kinase.

[0630] Following fixation and incubation, the slides are subjected to auto-radiographic analysis. Positive pools are identified and sub-pools are prepared and re-transfected using an iterative sub-pooling and re-screening process, eventually yielding a single clones that encodes the putative receptor.

[0631] As an alternative approach for receptor identification, the labeled polypeptides can be photoaffinity linked with cell membrane or extract preparations that express the receptor molecule. Cross-linked material is resolved by PAGE analysis and exposed to X-ray film. The labeled complex containing the receptors of the polypeptides can be excised, resolved into peptide fragments, and subjected to protein microsequencing. The amino acid sequence obtained from microsequencing would be used to design a set of degenerate oligonucleotide probes to screen a cDNA library to identify the genes encoding the putative receptors.

[0632] Moreover, the techniques of gene-shuffling, motif-shuffling, exon-shuffling, and/or codon-shuffling (collectively referred to as “DNA shuffling”) may be employed to modulate the activities of the polypeptide of the present invention thereby effectively generating agonists and antagonists of the polypeptide of the present invention. See generally, U.S. Pat. Nos. 5,605,793, 5,811,238, 5,830,721, 5,834,252, and 5,837,458, and Patten, P. A., et al., Curr. Opinion Biotechnol. 8:724-33 (1997); Harayama, S. Trends Biotechnol. 16(2):76-82 (1998); Hansson, L. O., et al., J. Mol. Biol. 287:265-76 (1999); and Lorenzo, M. M. and Blasco, R. Biotechniques 24(2):308-13 (1998); each of these patents and publications are hereby incorporated by reference). In one embodiment, alteration of polynucleotides and corresponding polypeptides may be achieved by DNA shuffling. DNA shuffling involves the assembly of two or more DNA segments into a desired molecule by homologous, or site-specific, recombination. In another embodiment, polynucleotides and corresponding polypeptides may be altered by being subjected to random mutagenesis by error-prone PCR, random nucleotide insertion or other methods prior to recombination. In another embodiment, one or more components, motifs, sections, parts, domains, fragments, etc., of the polypeptide of the present invention may be recombined with one or more components, motifs, sections, parts, domains, fragments, etc. of one or more heterologous molecules. In preferred embodiments, the heterologous molecules are family members. In further preferred embodiments, the heterologous molecule is a growth factor such as, for example, platelet-derived growth factor (PDGF), insulin-like growth factor (IGF-I), transforming growth factor (TGF)-alpha, epidermal growth factor (EGF), fibroblast growth factor (FGF), TGF-beta, bone morphogenetic protein (BMP)-2, BMP-4, BMP-5, BMP-6, BMP-7, activins A and B, decapentaplegic(dpp), 60A, OP-2, dorsalin, growth differentiation factors (GDFs), nodal, MIS, inhibin-alpha, TGF-beta1, TGF-beta2, TGF-beta3, TGF-beta5, and glial-derived neurotrophic factor (GDNF).

[0633] Other preferred fragments are biologically active fragments of the polypeptide of the present invention. Biologically active fragments are those exhibiting activity similar, but not necessarily identical, to an activity of the polypeptide of the present invention. The biological activity of the fragments may include an improved desired activity, or a decreased undesirable activity.

[0634] Additionally, this invention provides a method of screening compounds to identify those which modulate the action of the polypeptide of the present invention. An example of such an assay comprises combining a mammalian fibroblast cell, a the polypeptide of the present invention, the compound to be screened and ³[H] thymidine under cell culture conditions where the fibroblast cell would normally proliferate. A control assay may be performed in the absence of the compound to be screened and compared to the amount of fibroblast proliferation in the presence of the compound to determine if the compound stimulates proliferation by determining the uptake of ³[H] thymidine in each case. The amount of fibroblast cell proliferation is measured by liquid scintillation chromatography which measures the incorporation of ³[H] thymidine. Both agonist and antagonist compounds may be identified by this procedure.

[0635] In another method, a mammalian cell or membrane preparation expressing a receptor for a polypeptide of the present invention is incubated with a labeled polypeptide of the present invention in the presence of the compound. The ability of the compound to enhance or block this interaction could then be measured. Alternatively, the response of a known second messenger system following interaction of a compound to be screened and the receptor is measured and the ability of the compound to bind to the receptor and elicit a second messenger response is measured to determine if the compound is a potential agonist or antagonist. Such second messenger systems include but are not limited to, cAMP guanylate cyclase, ion channels or phosphoinositide hydrolysis.

[0636] All of these above assays can be used as diagnostic or prognostic markers. The molecules discovered using these assays can be used to treat disease or to bring about a particular result in a patient (e.g., blood vessel growth) by activating or inhibiting the polypeptide/molecule. Moreover, the assays can discover agents which may inhibit or enhance the production of the polypeptides of the invention from suitably manipulated cells or tissues.

[0637] Therefore, the invention includes a method of identifying compounds which bind to a polypeptide of the invention comprising the steps of: (a) incubating a candidate binding compound with a polypeptide of the present invention; and (b) determining if binding has occurred. Moreover, the invention includes a method of identifying agonists/antagonists comprising the steps of: (a) incubating a candidate compound with a polypeptide of the present invention, (b) assaying a biological activity, and (b) determining if a biological activity of the polypeptide has been altered.

Targeted Delivery

[0638] In another embodiment, the invention provides a method of delivering compositions to targeted cells expressing a receptor for a polypeptide of the invention, or cells expressing a cell bound form of a polypeptide of the invention.

[0639] As discussed herein, polypeptides or antibodies of the invention may be associated with heterologous polypeptides, heterologous nucleic acids, toxins, or prodrugs via hydrophobic, hydrophilic, ionic and/or covalent interactions. In one embodiment, the invention provides a method for the specific delivery of compositions of the invention to cells by administering polypeptides of the invention (including antibodies) that are associated with heterologous polypeptides or nucleic acids. In one example, the invention provides a method for delivering a therapeutic protein into the targeted cell. In another example, the invention provides a method for delivering a single stranded nucleic acid (e.g., antisense or ribozymes) or double stranded nucleic acid (e.g., DNA that can integrate into the cell's genome or replicate episomally and that can be transcribed) into the targeted cell.

[0640] In another embodiment, the invention provides a method for the specific destruction of cells (e.g., the destruction of tumor cells) by administering polypeptides of the invention (e.g., polypeptides of the invention or antibodies of the invention) in association with toxins or cytotoxic prodrugs.

[0641] By “toxin” is meant compounds that bind and activate endogenous cytotoxic effector systems, radioisotopes, holotoxins, modified toxins, catalytic subunits of toxins, or any molecules or enzymes not normally present in or on the surface of a cell that under defined conditions cause the cell's death. Toxins that may be used according to the methods of the invention include, but are not limited to, radioisotopes known in the art, compounds such as, for example, antibodies (or complement fixing containing portions thereof) that bind an inherent or induced endogenous cytotoxic effector system, thymidine kinase, endonuclease, RNAse, alpha toxin, ricin, abrin, Pseudomonas exotoxin A, diphtheria toxin, saporin, momordin, gelonin, pokeweed antiviral protein, alpha-sarcin and cholera toxin. By “cytotoxic prodrug” is meant a non-toxic compound that is converted by an enzyme, normally present in the cell, into a cytotoxic compound. Cytotoxic prodrugs that may be used according to the methods of the invention include, but are not limited to, glutamyl derivatives of benzoic acid mustard alkylating agent, phosphate derivatives of etoposide or mitomycin C, cytosine arabinoside, daunorubisin, and phenoxyacetamide derivatives of doxorubicin.

Drug Screening

[0642] Further contemplated is the use of the polypeptides of the present invention, or the polynucleotides encoding these polypeptides, to screen for molecules which modify the activities of the polypeptides of the present invention. Such a method would include contacting the polypeptide of the present invention with a selected compound(s) suspected of having antagonist or agonist activity, and assaying the activity of these polypeptides following binding.

[0643] This invention is particularly useful for screening therapeutic compounds by using the polypeptides of the present invention, or binding fragments thereof, in any of a variety of drug screening techniques. The polypeptide or fragment employed in such a test may be affixed to a solid support, expressed on a cell surface, free in solution, or located intracellularly. One method of drug screening utilizes eukaryotic or prokaryotic host cells that are stably transformed with recombinant nucleic acids expressing the polypeptide or fragment. Drugs are screened against such transformed cells in competitive binding assays. One may measure, for example, the formulation of complexes between the agent being tested and a polypeptide of the present invention.

[0644] Thus, the present invention provides methods of screening for drugs or any other agents that affect activities mediated by the polypeptides of the present invention. These methods comprise contacting such an agent with a polypeptide of the present invention or a fragment thereof and assaying for the presence of a complex between the agent and the polypeptide or a fragment thereof, by methods well known in the art. In such a competitive binding assay, the agents to screen are typically labeled. Following incubation, free agent is separated from that present in bound form, and the amount of free or uncomplexed label is a measure of the ability of a particular agent to bind to the polypeptides of the present invention.

[0645] Another technique for drug screening provides high throughput screening for compounds having suitable binding affinity to the polypeptides of the present invention, and is described in great detail in European Patent Application 84/03564, published on Sep. 13, 1984, which is incorporated herein by reference herein. Briefly stated, large numbers of different small peptide test compounds are synthesized on a solid substrate, such as plastic pins or some other surface. The peptide test compounds are reacted with polypeptides of the present invention and washed. Bound polypeptides are then detected by methods well known in the art. Purified polypeptides are coated directly onto plates for use in the aforementioned drug screening techniques. In addition, non-neutralizing antibodies may be used to capture the peptide and immobilize it on the solid support.

[0646] This invention also contemplates the use of competitive drug screening assays in which neutralizing antibodies capable of binding polypeptides of the present invention specifically compete with a test compound for binding to the polypeptides or fragments thereof. In this manner, the antibodies are used to detect the presence of any peptide which shares one or more antigenic epitopes with a polypeptide of the invention.

Antisense and Ribozyme (Antagonists)

[0647] In specific embodiments, antagonists according to the present invention are nucleic acids corresponding to the sequences contained in SEQ ID NO:Y or the complementary strand thereof, and/or to cDNA sequences contained in cDNA ATCC™ Deposit No:Z identified for example, in Table 1A and/or 1B. In one embodiment, antisense sequence is generated internally, by the organism, in another embodiment, the antisense sequence is separately administered (see, for example, O'Connor, J., Neurochem. 56:560 (1991). Oligodeoxynucleotides as Antisense Inhibitors of Gene Expression, CRC Press, Boca Raton, Fla. (1988). Antisense technology can be used to control gene expression through antisense DNA or RNA, or through triple-helix formation. Antisense techniques are discussed for example, in Okano, J., Neurochem. 56:560 (1991); Oligodeoxynucleotides as Antisense Inhibitors of Gene Expression, CRC Press, Boca Raton, Fla. (1988). Triple helix formation is discussed in, for instance, Lee et al., Nucleic Acids Research 6:3073 (1979); Cooney et al., Science 241:456 (1988); and Dervan et al., Science 251:1300(1991). The methods are based on binding of a polynucleotide to a complementary DNA or RNA.

[0648] For example, the use of c-myc and c-myb antisense RNA constructs to inhibit the growth of the non-lymphocytic leukemia cell line HL-60 and other cell lines was previously described. (Wickstrom et al. (1988); Anfossi et al. (1989)). These experiments were performed in vitro by incubating cells with the oligoribonucleotide. A similar procedure for in vivo use is described in WO 91/15580. Briefly, a pair of oligonucleotides for a given antisense RNA is produced as follows: A sequence complimentary to the first 15 bases of the open reading frame is flanked by an EcoRI site on the 5 end and a HindIII site on the 3 end. Next, the pair of oligonucleotides is heated at 90° C. for one minute and then annealed in 2× ligation buffer (20 mM TRIS HCl pH 7.5, 10 mM MgCl₂, 10 MM dithiothreitol (DTT) and 0.2 mM ATP) and then ligated to the EcoRI/Hind III site of the retroviral vector PMV7 (WO 91/15580).

[0649] For example, the 5′ coding portion of a polynucleotide that encodes the polypeptide of the present invention may be used to design an antisense RNA oligonucleotide of from about 10 to 40 base pairs in length. A DNA oligonucleotide is designed to be complementary to a region of the gene involved in transcription thereby preventing transcription and the production of the receptor. The antisense RNA oligonucleotide hybridizes to the mRNA in vivo and blocks translation of the mRNA molecule into receptor polypeptide.

[0650] In one embodiment, the antisense nucleic acid of the invention is produced intracellularly by transcription from an exogenous sequence. For example, a vector or a portion thereof, is transcribed, producing an antisense nucleic acid (RNA) of the invention. Such a vector would contain a sequence encoding the antisense nucleic acid. Such a vector can remain episomal or become chromosomally integrated, as long as it can be transcribed to produce the desired antisense RNA. Such vectors can be constructed by recombinant DNA technology methods standard in the art. Vectors can be plasmid, viral, or others known in the art, used for replication and expression in vertebrate cells. Expression of the sequence encoding the polypeptide of the present invention or fragments thereof, can be by any promoter known in the art to act in vertebrate, preferably human cells. Such promoters can be inducible or constitutive. Such promoters include, but are not limited to, the SV40 early promoter region (Bernoist and Chambon, Nature 29:304-310 (1981), the promoter contained in the 3′ long terminal repeat of Rous sarcoma virus (Yamamoto et al., Cell 22:787-797 (1980), the herpes thymidine promoter (Wagner et al., Proc. Natl. Acad. Sci. U.S.A. 78:1441-1445 (1981), the regulatory sequences of the metallothionein gene (Brinster, et al., Nature 296:3942 (1982)), etc.

[0651] The antisense nucleic acids of the invention comprise a sequence complementary to at least a portion of an RNA transcript of a gene of the present invention. However, absolute complementarity, although preferred, is not required. A sequence “complementary to at least a portion of an RNA,” referred to herein, means a sequence having sufficient complementarity to be able to hybridize with the RNA, forming a stable duplex; in the case of double stranded antisense nucleic acids, a single strand of the duplex DNA may thus be tested, or triplex formation may be assayed. The ability to hybridize will depend on both the degree of complementarity and the length of the antisense nucleic acid. Generally, the larger the hybridizing nucleic acid, the more base mismatches with a RNA it may contain and still form a stable duplex (or triplex as the case may be). One skilled in the art can ascertain a tolerable degree of mismatch by use of standard procedures to determine the melting point of the hybridized complex.

[0652] Oligonucleotides that are complementary to the 5′ end of the message, e.g., the 5′ untranslated sequence up to and including the AUG initiation codon, should work most efficiently at inhibiting translation. However, sequences complementary to the 3′ untranslated sequences of mRNAs have been shown to be effective at inhibiting translation of mRNAs as well. See generally, Wagner, R., 1994, Nature 372:333-335. Thus, oligonucleotides complementary to either the 5′- or 3′-non-translated, non-coding regions of polynucleotide sequences described herein could be used in an antisense approach to inhibit translation of endogenous mRNA. Oligonucleotides complementary to the 5′ untranslated region of the mRNA should include the complement of the AUG start codon. Antisense oligonucleotides complementary to mRNA coding regions are less efficient inhibitors of translation but could be used in accordance with the invention. Whether designed to hybridize to the 5′-, 3′- or coding region of mRNA of the present invention, antisense nucleic acids should be at least six nucleotides in length, and are preferably oligonucleotides ranging from 6 to about 50 nucleotides in length. In specific aspects the oligonucleotide is at least 10 nucleotides, at least 17 nucleotides, at least 25 nucleotides or at least 50 nucleotides.

[0653] The polynucleotides of the invention can be DNA or RNA or chimeric mixtures or derivatives or modified versions thereof, single-stranded or double-stranded. The oligonucleotide can be modified at the base moiety, sugar moiety, or phosphate backbone, for example, to improve stability of the molecule, hybridization, etc. The oligonucleotide may include other appended groups such as peptides (e.g., for targeting host cell receptors in vivo), or agents facilitating transport across the cell membrane (see, e.g., Letsinger et al., 1989, Proc. Natl. Acad. Sci. U.S.A. 86:6553-6556; Lemaitre et al., 1987, Proc. Natl. Acad. Sci. 84:648-652; PCT Publication No. WO88/09810, published Dec. 15, 1988) or the blood-brain barrier (see, e.g., PCT Publication No. WO89/10134, published Apr. 25, 1988), hybridization-triggered cleavage agents. (See, e.g., Krol et al., 1988, BioTechniques 6:958-976) or intercalating agents. (See, e.g., Zon, 1988, Pharm. Res. 5:539-549). To this end, the oligonucleotide may be conjugated to another molecule, e.g., a peptide, hybridization triggered cross-linking agent, transport agent, hybridization-triggered cleavage agent, etc.

[0654] The antisense oligonucleotide may comprise at least one modified base moiety which is selected from the group including, but not limited to, 5-fluorouracil, 5-bromouracil, 5-chlorouracil, 5-iodouracil, hypoxanthine, xantine, 4-acetylcytosine, 5-(carboxyhydroxylmethyl) uracil, 5-carboxymethylaminomethyl-2-thiouridine, 5-carboxymethylaminomethyluracil, dihydrouracil, beta-D-galactosylqueosine, inosine, N6-isopentenyladenine, 1-methylguanine, 1-methylinosine, 2,2-dimethylguanine, 2-methyladenine, 2-methylguanine, 3-methylcytosine, 5-methylcytosine, N6-adenine, 7-methylguanine, 5-methylaminomethyluracil, 5-methoxyaminomethyl-2-thiouracil, beta-D-mannosylqueosine, 5′-methoxycarboxymethyluracil, 5-methoxyuracil, 2-methylthio-N-6-isopentenyladenine, uracil-5-oxyacetic acid (v), wybutoxosine, pseudouracil, queosine, 2-thiocytosine, 5-methyl-2-thiouracil, 2-thiouracil, 4-thiouracil, 5-methyluracil, uracil-5-oxyacetic acid methylester, uracil-5-oxyacetic acid (v), 5-methyl-2-thiouracil, 3-(3-amino-3-N-2-carboxypropyl) uracil, (acp3)w, and 2,6-diaminopurine.

[0655] The antisense oligonucleotide may also comprise at least one modified sugar moiety selected from the group including, but not limited to, arabinose, 2-fluoroarabinose, xylulose, and hexose.

[0656] In yet another embodiment, the antisense oligonucleotide comprises at least one modified phosphate backbone selected from the group including, but not limited to, a phosphorothioate, a phosphorodithioate, a phosphoramidothioate, a phosphoramidate, a phosphordiamidate, a methylphosphonate, an alkyl phosphotriester, and a formacetal or analog thereof.

[0657] In yet another embodiment, the antisense oligonucleotide is an a-anomeric oligonucleotide. An a-anomeric oligonucleotide forms specific double-stranded hybrids with complementary RNA in which, contrary to the usual b-units, the strands run parallel to each other (Gautier et al., 1987, Nucl. Acids Res. 15:6625-6641). The oligonucleotide is a 2′-0-methylribonucleotide (Inoue et al., 1987, Nucl. Acids Res. 15:6131-6148), or a chimeric RNA-DNA analogue (Inoue et al., 1987, FEBS Lett. 215:327-330).

[0658] Polynucleotides of the invention may be synthesized by standard methods known in the art, e.g. by use of an automated DNA synthesizer (such as are commercially available from Biosearch, Applied Biosystems, etc.). As examples, phosphorothioate oligonucleotides may be synthesized by the method of Stein et al. (1988, Nucl. Acids Res. 16:3209), methylphosphonate oligonucleotides can be prepared by use of controlled pore glass polymer supports (Sarin et al., 1988, Proc. Natl. Acad. Sci. U.S.A. 85:7448-7451), etc.

[0659] While antisense nucleotides complementary to the coding region sequence could be used, those complementary to the transcribed untranslated region are most preferred.

[0660] Potential antagonists according to the invention also include catalytic RNA, or a ribozyme (See, e.g., PCT International Publication WO 90/11364, published Oct. 4, 1990; Sarver et al, Science 247:1222-1225 (1990). While ribozymes that cleave mRNA at site specific recognition sequences can be used to destroy mRNAs, the use of hammerhead ribozymes is preferred. Hammerhead ribozymes cleave mRNAs at locations dictated by flanking regions that form complementary base pairs with the target mRNA. The sole requirement is that the target mRNA have the following sequence of two bases: 5′-UG-3′. The construction and production of hammerhead ribozymes is well known in the art and is described more fully in Haseloff and Gerlach, Nature 334:585-591 (1988). There are numerous potential hammerhead ribozyme cleavage sites within the nucleotide sequence of SEQ ID NO:X. Preferably, the ribozyme is engineered so that the cleavage recognition site is located near the 5′ end of the mRNA; i.e., to increase efficiency and minimize the intracellular accumulation of non-functional mRNA transcripts.

[0661] As in the antisense approach, the ribozymes of the invention can be composed of modified oligonucleotides (e.g., for improved stability, targeting, etc.) and should be delivered to cells which express in vivo. DNA constructs encoding the ribozyme may be introduced into the cell in the same manner as described above for the introduction of antisense encoding DNA. A preferred method of delivery involves using a DNA construct “encoding” the ribozyme under the control of a strong constitutive promoter, such as, for example, pol III or pol II promoter, so that transfected cells will produce sufficient quantities of the ribozyme to destroy endogenous messages and inhibit translation. Since ribozymes unlike antisense molecules, are catalytic, a lower intracellular concentration is required for efficiency.

[0662] Antagonist/agonist compounds may be employed to inhibit the cell growth and proliferation effects of the polypeptides of the present invention on neoplastic cells and tissues, i.e. stimulation of angiogenesis of tumors, and, therefore, retard or prevent abnormal cellular growth and proliferation, for example, in tumor formation or growth.

[0663] The antagonist/agonist may also be employed to prevent hyper-vascular diseases, and prevent the proliferation of epithelial lens cells after extracapsular cataract surgery. Prevention of the mitogenic activity of the polypeptides of the present invention may also be desirous in cases such as restenosis after balloon angioplasty.

[0664] The antagonist/agonist may also be employed to prevent the growth of scar tissue during wound healing.

[0665] The antagonist/agonist may also be employed to treat the diseases described herein.

[0666] Thus, the invention provides a method of treating disorders or diseases, including but not limited to the disorders or diseases listed throughout this application, associated with overexpression of a polynucleotide of the present invention by administering to a patient (a) an antisense molecule directed to the polynucleotide of the present invention, and/or (b) a ribozyme directed to the polynucleotide of the present invention.

Binding Peptides and Other Molecules

[0667] The invention also encompasses screening methods for identifying polypeptides and nonpolypeptides that bind polypeptides of the invention, and the binding molecules identified thereby. These binding molecules are useful, for example, as agonists and antagonists of the polypeptides of the invention. Such agonists and antagonists can be used, in accordance with the invention, in the therapeutic embodiments described in detail, below.

[0668] This method comprises the steps of:

[0669] contacting polypeptides of the invention with a plurality of molecules; and

[0670] identifying a molecule that binds the polypeptides of the invention.

[0671] The step of contacting the polypeptides of the invention with the plurality of molecules may be effected in a number of ways. For example, one may contemplate immobilizing the polypeptides on a solid support and bringing a solution of the plurality of molecules in contact with the immobilized polypeptides. Such a procedure would be akin to an affinity chromatographic process, with the affinity matrix being comprised of the immobilized polypeptides of the invention. The molecules having a selective affinity for the polypeptides can then be purified by affinity selection. The nature of the solid support, process for attachment of the polypeptides to the solid support, solvent, and conditions of the affinity isolation or selection are largely conventional and well known to those of ordinary skill in the art.

[0672] Alternatively, one may also separate a plurality of polypeptides into substantially separate fractions comprising a subset of or individual polypeptides. For instance, one can separate the plurality of polypeptides by gel electrophoresis, column chromatography, or like method known to those of ordinary skill for the separation of polypeptides. The individual polypeptides can also be produced by a transformed host cell in such a way as to be expressed on or about its outer surface (e.g., a recombinant phage). Individual isolates can then be “probed” by the polypeptides of the invention, optionally in the presence of an inducer should one be required for expression, to determine if any selective affinity interaction takes place between the polypeptides and the individual clone. Prior to contacting the polypeptides with each fraction comprising individual polypeptides, the polypeptides could first be transferred to a solid support for additional convenience. Such a solid support may simply be a piece of filter membrane, such as one made of nitrocellulose or nylon. In this manner, positive clones could be identified from a collection of transformed host cells of an expression library, which harbor a DNA construct encoding a polypeptide having a selective affinity for polypeptides of the invention. Furthermore, the amino acid sequence of the polypeptide having a selective affinity for the polypeptides of the invention can be determined directly by conventional means or the coding sequence of the DNA encoding the polypeptide can frequently be determined more conveniently. The primary sequence can then be deduced from the corresponding DNA sequence. If the amino acid sequence is to be determined from the polypeptide itself, one may use microsequencing techniques. The sequencing technique may include mass spectroscopy.

[0673] In certain situations, it may be desirable to wash away any unbound polypeptides from a mixture of the polypeptides of the invention and the plurality of polypeptides prior to attempting to determine or to detect the presence of a selective affinity interaction. Such a wash step may be particularly desirable when the polypeptides of the invention or the plurality of polypeptides are bound to a solid support.

[0674] The plurality of molecules provided according to this method may be provided by way of diversity libraries, such as random or combinatorial peptide or nonpeptide libraries which can be screened for molecules that specifically bind polypeptides of the invention. Many libraries are known in the art that can be used, e.g., chemically synthesized libraries, recombinant (e.g., phage display libraries), and in vitro translation-based libraries. Examples of chemically synthesized libraries are described in Fodor et al., 1991, Science 251:767-773; Houghten et al., 1991, Nature 354:84-86; Lam et al., 1991, Nature 354:82-84; Medynski, 1994, Bio/Technology 12:709-710;Gallop et al., 1994, J. Medicinal Chemistry 37(9):1233-1251; Ohlmeyer et al., 1993, Proc. Natl. Acad. Sci. USA 90:10922-10926; Erb et al., 1994, Proc. Natl. Acad. Sci. USA 91:11422-11426; Houghten et al., 1992, Biotechniques 13:412; Jayawickreme et al., 1994, Proc. Natl. Acad. Sci. USA 91:1614-1618; Salmon et al., 1993, Proc. Natl. Acad. Sci. USA 90:11708-11712; PCT Publication No. WO 93/20242; and Brenner and Lerner, 1992, Proc. Natl. Acad. Sci. USA 89:5381-5383.

[0675] Examples of phage display libraries are described in Scott and Smith, 1990, Science 249:386-390; Devlin et al., 1990, Science, 249:404-406; Christian, R. B., et al., 1992, J. Mol. Biol. 227:711-718); Lenstra, 1992, J. Immunol. Meth. 152:149-157; Kay et al., 1993, Gene 128:59-65; and PCT Publication No. WO 94/18318 dated Aug. 18, 1994.

[0676] In vitro translation-based libraries include but are not limited to those described in PCT Publication No. WO 91/05058 dated Apr. 18, 1991; and Mattheakis et al., 1994, Proc. Natl. Acad. Sci. USA 91:9022-9026.

[0677] By way of examples of nonpeptide libraries, a benzodiazepine library (see e.g., Bunin et al., 1994, Proc. Natl. Acad. Sci. USA 91:4708-4712) can be adapted for use. Peptoid libraries (Simon et al., 1992, Proc. Natl. Acad. Sci. USA 89:9367-9371) can also be used. Another example of a library that can be used, in which the amide functionalities in peptides have been permethylated to generate a chemically transformed combinatorial library, is described by Ostresh et al. (1994, Proc. Natl. Acad. Sci. USA 91:11138-11142).

[0678] The variety of non-peptide libraries that are useful in the present invention is great. For example, Ecker and Crooke, 1995, Bio/Technology 13:351-360 list benzodiazepines, hydantoins, piperazinediones, biphenyls, sugar analogs, beta-mercaptoketones, arylacetic acids, acylpiperidines, benzopyrans, cubanes, xanthines, aminimides, and oxazolones as among the chemical species that form the basis of various libraries.

[0679] Non-peptide libraries can be classified broadly into two types: decorated monomers and oligomers. Decorated monomer libraries employ a relatively simple scaffold structure upon which a variety functional groups is added. Often the scaffold will be a molecule with a known useful pharmacological activity. For example, the scaffold might be the benzodiazepine structure.

[0680] Non-peptide oligomer libraries utilize a large number of monomers that are assembled together in ways that create new shapes that depend on the order of the monomers. Among the monomer units that have been used are carbamates, pyrrolinones, and morpholinos. Peptoids, peptide-like oligomers in which the side chain is attached to the alpha amino group rather than the alpha carbon, form the basis of another version of non-peptide oligomer libraries. The first non-peptide oligomer libraries utilized a single type of monomer and thus contained a repeating backbone. Recent libraries have utilized more than one monomer, giving the libraries added flexibility.

[0681] Screening the libraries can be accomplished by any of a variety of commonly known methods. See, e.g., the following references, which disclose screening of peptide libraries: Parmley and Smith, 1989, Adv. Exp. Med. Biol. 251:215-218; Scott and Smith, 1990, Science 249:386-390; Fowlkes et al., 1992; BioTechniques 13:422-427; Oldenburg et al., 1992, Proc. Natl. Acad. Sci. USA 89:5393-5397; Yu et al., 1994, Cell 76:933-945; Staudt et al., 1988, Science 241:577-580; Bock et al., 1992, Nature 355:564-566; Tuerk et al., 1992, Proc. Natl. Acad. Sci. USA 89:6988-6992; Ellington et al., 1992, Nature 355:850-852; U.S. Pat. No. 5,096,815, U.S. Pat. No. 5,223,409, and U.S. Pat. No. 5,198,346, all to Ladner et al.; Rebar and Pabo, 1993, Science 263:671-673; and CT Publication No. WO 94/18318.

[0682] In a specific embodiment, screening to identify a molecule that binds polypeptides of the invention can be carried out by contacting the library members with polypeptides of the invention immobilized on a solid phase and harvesting those library members that bind to the polypeptides of the invention. Examples of such screening methods, termed “panning” techniques are described by way of example in Parmley and Smith, 1988, Gene 73:305-318; Fowlkes et al., 1992, BioTechniques 13:422-427; PCT Publication No. WO 94/18318; and in references cited herein.

[0683] In another embodiment, the two-hybrid system for selecting interacting proteins in yeast (Fields and Song, 1989, Nature 340:245-246; Chien et al., 1991, Proc. Natl. Acad. Sci. USA 88:9578-9582) can be used to identify molecules that specifically bind to polypeptides of the invention.

[0684] Where the binding molecule is a polypeptide, the polypeptide can be conveniently selected from any peptide library, including random peptide libraries, combinatorial peptide libraries, or biased peptide libraries. The term “biased” is used herein to mean that the method of generating the library is manipulated so as to restrict one or more parameters that govern the diversity of the resulting collection of molecules, in this case peptides.

[0685] Thus, a truly random peptide library would generate a collection of peptides in which the probability of finding a particular amino acid at a given position of the peptide is the same for all 20 amino acids. A bias can be introduced into the library, however, by specifying, for example, that a lysine occur every fifth amino acid or that positions 4, 8, and 9 of a decapeptide library be fixed to include only arginine. Clearly, many types of biases can be contemplated, and the present invention is not restricted to any particular bias. Furthermore, the present invention contemplates specific types of peptide libraries, such as phage displayed peptide libraries and those that utilize a DNA construct comprising a lambda phage vector with a DNA insert.

[0686] As mentioned above, in the case of a binding molecule that is a polypeptide, the polypeptide may have about 6 to less than about 60 amino acid residues, preferably about 6 to about 10 amino acid residues, and most preferably, about 6 to about 22 amino acids. In another embodiment, a binding polypeptide has in the range of 15-100 amino acids, or 20-50 amino acids.

[0687] The selected binding polypeptide can be obtained by chemical synthesis or recombinant expression.

Other Activities

[0688] A polypeptide, polynucleotide, agonist, or antagonist of the present invention, as a result of the ability to stimulate vascular endothelial cell growth, may be employed in treatment for stimulating re-vascularization of ischemic tissues due to various disease conditions such as thrombosis, arteriosclerosis, and other cardiovascular conditions. The polypeptide, polynucleotide, agonist, or antagonist of the present invention may also be employed to stimulate angiogenesis and limb regeneration, as discussed above.

[0689] A polypeptide, polynucleotide, agonist, or antagonist of the present invention may also be employed for treating wounds due to injuries, burns, post-operative tissue repair, and ulcers since they are mitogenic to various cells of different origins, such as fibroblast cells and skeletal muscle cells, and therefore, facilitate the repair or replacement of damaged or diseased tissue.

[0690] A polypeptide, polynucleotide, agonist, or antagonist of the present invention may also be employed stimulate neuronal growth and to treat and prevent neuronal damage which occurs in certain neuronal disorders or neuro-degenerative conditions such as Alzheimer's disease, Parkinson's disease, and AIDS-related complex. A polypeptide, polynucleotide, agonist, or antagonist of the present invention may have the ability to stimulate chondrocyte growth, therefore, they may be employed to enhance bone and periodontal regeneration and aid in tissue transplants or bone grafts.

[0691] A polypeptide, polynucleotide, agonist, or antagonist of the present invention may be also be employed to prevent skin aging due to sunburn by stimulating keratinocyte growth.

[0692] A polypeptide, polynucleotide, agonist, or antagonist of the present invention may also be employed for preventing hair loss, since FGF family members activate hair-forming cells and promotes melanocyte growth. Along the same lines, a polypeptide, polynucleotide, agonist, or antagonist of the present invention may be employed to stimulate growth and differentiation of hematopoietic cells and bone marrow cells when used in combination with other cytokines.

[0693] A polypeptide, polynucleotide, agonist, or antagonist of the present invention may also be employed to maintain organs before transplantation or for supporting cell culture of primary tissues. A polypeptide, polynucleotide, agonist, or antagonist of the present invention may also be employed for inducing tissue of mesodermal origin to differentiate in early embryos.

[0694] A polypeptide, polynucleotide, agonist, or antagonist of the present invention may also increase or decrease the differentiation or proliferation of embryonic stem cells, besides, as discussed above, hematopoietic lineage.

[0695] A polypeptide, polynucleotide, agonist, or antagonist of the present invention may also be used to modulate mammalian characteristics, such as body height, weight, hair color, eye color, skin, percentage of adipose tissue, pigmentation, size, and shape (e.g., cosmetic surgery). Similarly, a polypeptide, polynucleotide, agonist, or antagonist of the present invention may be used to modulate mammalian metabolism affecting catabolism, anabolism, processing, utilization, and storage of energy.

[0696] A polypeptide, polynucleotide, agonist, or antagonist of the present invention may be used to change a mammal's mental state or physical state by influencing biorhythms, caricadic rhythms, depression (including depressive disorders), tendency for violence, tolerance for pain, reproductive capabilities (preferably by Activin or Inhibin-like activity), hormonal or endocrine levels, appetite, libido, memory, stress, or other cognitive qualities.

[0697] A polypeptide, polynucleotide, agonist, or antagonist of the present invention may also be used as a food additive or preservative, such as to increase or decrease storage capabilities, fat content, lipid, protein, carbohydrate, vitamins, minerals, cofactors or other nutritional components.

[0698] The above-recited applications have uses in a wide variety of hosts. Such hosts include, but are not limited to, human, murine, rabbit, goat, guinea pig, camel, horse, mouse, rat, hamster, pig, micro-pig, chicken, goat, cow, sheep, dog, cat, non-human primate, and human. In specific embodiments, the host is a mouse, rabbit, goat, guinea pig, chicken, rat, hamster, pig, sheep, dog or cat. In preferred embodiments, the host is a mammal. In most preferred embodiments, the host is a human.

Other Preferred Embodiments

[0699] Other preferred embodiments of the claimed invention include an isolated nucleic acid molecule comprising a nucleotide sequence which is at least 95% identical to a sequence of at least about 50 contiguous nucleotides in the nucleotide sequence of SEQ ID NO:X or the complementary strand thereto, the nucleotide sequence as defined in column 5 of Table 1B or columns 8 and 9 of Table 2 or the complementary strand thereto, and/or cDNA contained in ATCC™ Deposit No:Z.

[0700] Also preferred is a nucleic acid molecule wherein said sequence of contiguous nucleotides is included in the nucleotide sequence of the portion of SEQ ID NO:X as defined in column 5, “ORF (From-To)”, in Table 1B.1.

[0701] Also preferred is a nucleic acid molecule wherein said sequence of contiguous nucleotides is included in the nucleotide sequence of the portion of SEQ ID NO:X as defined in columns 8 and 9, “NT From” and “NT To” respectively, in Table 2.

[0702] Also preferred is an isolated nucleic acid molecule comprising a nucleotide sequence which is at least 95% identical to a sequence of at least about 150 contiguous nucleotides in the nucleotide sequence of SEQ ID NO:X or the complementary strand thereto, the nucleotide sequence as defined in column 5 of Table 1B.1 or columns 8 and 9 of Table 2 or the complementary strand thereto, and/or cDNA contained in ATCC™ Deposit No:Z.

[0703] Further preferred is an isolated nucleic acid molecule comprising a nucleotide sequence which is at least 95% identical to a sequence of at least about 500 contiguous nucleotides in the nucleotide sequence of SEQ ID NO:X or the complementary strand thereto, the nucleotide sequence as defined in column 5 of Table 1B.1 or columns 8 and 9 of Table 2 or the complementary strand thereto, and/or cDNA contained in ATCC™ Deposit No:Z.

[0704] A further preferred embodiment is a nucleic acid molecule comprising a nucleotide sequence which is at least 95% identical to the nucleotide sequence of the portion of SEQ ID NO:X defined in column 5, “ORF (From-To)”, in Table 1B.1.

[0705] A further preferred embodiment is a nucleic acid molecule comprising a nucleotide sequence which is at least 95% identical to the nucleotide sequence of the portion of SEQ ID NO:X defined in columns 8 and 9, “NT From” and “NT To”, respectively, in Table 2.

[0706] A further preferred embodiment is an isolated nucleic acid molecule comprising a nucleotide sequence which is at least 95% identical to the complete nucleotide sequence of SEQ ID NO:X or the complementary strand thereto, the nucleotide sequence as defined in column 5 of Table 1B.1 or columns 8 and 9 of Table 2 or the complementary strand thereto, and/or cDNA contained in ATCC™ Deposit No:Z.

[0707] Also preferred is an isolated nucleic acid molecule which hybridizes under stringent hybridization conditions to a nucleic acid molecule comprising a nucleotide sequence of SEQ ID NO:X or the complementary strand thereto, the nucleotide sequence as defined in column 5 of Table 1B.1 or columns 8 and 9 of Table 2 or the complementary strand thereto, and/or cDNA contained in ATCC™ Deposit No:Z, wherein said nucleic acid molecule which hybridizes does not hybridize under stringent hybridization conditions to a nucleic acid molecule having a nucleotide sequence consisting of only A residues or of only T residues.

[0708] Also preferred is a composition of matter comprising a DNA molecule which comprises the cDNA contained in ATCC™ Deposit No:Z.

[0709] Also preferred is an isolated nucleic acid molecule comprising a nucleotide sequence which is at least 95% identical to a sequence of at least 50 contiguous nucleotides of the cDNA sequence contained in ATCC™ Deposit No:Z.

[0710] Also preferred is an isolated nucleic acid molecule, wherein said sequence of at least 50 contiguous nucleotides is included in the nucleotide sequence of an open reading frame sequence encoded by cDNA contained in ATCC™ Deposit No:Z.

[0711] Also preferred is an isolated nucleic acid molecule comprising a nucleotide sequence which is at least 95% identical to sequence of at least 150 contiguous nucleotides in the nucleotide sequence encoded by cDNA contained in ATCC™ Deposit No:Z.

[0712] A further preferred embodiment is an isolated nucleic acid molecule comprising a nucleotide sequence which is at least 95% identical to sequence of at least 500 contiguous nucleotides in the nucleotide sequence encoded by cDNA contained in ATCC™ Deposit No:Z.

[0713] A further preferred embodiment is an isolated nucleic acid molecule comprising a nucleotide sequence which is at least 95% identical to the complete nucleotide sequence encoded by cDNA contained in ATCC™ Deposit No:Z.

[0714] A further preferred embodiment is a method for detecting in a biological sample a nucleic acid molecule comprising a nucleotide sequence which is at least 95% identical to a sequence of at least 50 contiguous nucleotides in a sequence selected from the group consisting of: a nucleotide sequence of SEQ ID NO:X or the complementary strand thereto; the nucleotide sequence as defined in column 5 of Table 1B.1 or columns 8 and 9 of Table 2 or the complementary strand thereto; and a nucleotide sequence encoded by cDNA contained in ATCC™ Deposit No:Z; which method comprises a step of comparing a nucleotide sequence of at least one nucleic acid molecule in said sample with a sequence selected from said group and determining whether the sequence of said nucleic acid molecule in said sample is at least 95% identical to said selected sequence.

[0715] Also preferred is the above method wherein said step of comparing sequences comprises determining the extent of nucleic acid hybridization between nucleic acid molecules in said sample and a nucleic acid molecule comprising said sequence selected from said group. Similarly, also preferred is the above method wherein said step of comparing sequences is performed by comparing the nucleotide sequence determined from a nucleic acid molecule in said sample with said sequence selected from said group. The nucleic acid molecules can comprise DNA molecules or RNA molecules.

[0716] A further preferred embodiment is a method for identifying the species, tissue or cell type of a biological sample which method comprises a step of detecting nucleic acid molecules in said sample, if any, comprising a nucleotide sequence that is at least 95% identical to a sequence of at least 50 contiguous nucleotides in a sequence selected from the group consisting of: a nucleotide sequence of SEQ ID NO:X or the complementary strand thereto; the nucleotide sequence as defined in column 5 of Table 1B.1 or columns 8 and 9 of Table 2 or the complementary strand thereto; and a nucleotide sequence of the cDNA contained in ATCC™ Deposit No:Z.

[0717] The method for identifying the species, tissue or cell type of a biological sample can comprise a step of detecting nucleic acid molecules comprising a nucleotide sequence in a panel of at least two nucleotide sequences, wherein at least one sequence in said panel is at least 95% identical to a sequence of at least 50 contiguous nucleotides in a sequence selected from said group.

[0718] Also preferred is a method for diagnosing in a subject a pathological condition associated with abnormal structure or expression of a nucleotide sequence of SEQ ID NO:X or the complementary strand thereto; the nucleotide sequence as defined in column 5 of Table 1B.1 or columns 8 and 9 of Table 2 or the complementary strand thereto; or the cDNA contained in ATCC™ Deposit No:Z which encodes a protein, wherein the method comprises a step of detecting in a biological sample obtained from said subject nucleic acid molecules, if any, comprising a nucleotide sequence that is at least 95% identical to a sequence of at least 50 contiguous nucleotides in a sequence selected from the group consisting of: a nucleotide sequence of SEQ ID NO:X or the complementary strand thereto; the nucleotide sequence as defined in column 5 of Table 1B.1 or columns 8 and 9 of Table 2 or the complementary strand thereto; and a nucleotide sequence of cDNA contained in ATCC™ Deposit No:Z.

[0719] The method for diagnosing a pathological condition can comprise a step of detecting nucleic acid molecules comprising a nucleotide sequence in a panel of at least two nucleotide sequences, wherein at least one sequence in said panel is at least 95% identical to a sequence of at least 50 contiguous nucleotides in a sequence selected from said group.

[0720] Also preferred is a composition of matter comprising isolated nucleic acid molecules wherein the nucleotide sequences of said nucleic acid molecules comprise a panel of at least two nucleotide sequences, wherein at least one sequence in said panel is at least 95% identical to a sequence of at least 50 contiguous nucleotides in a sequence selected from the group consisting of: a nucleotide sequence of SEQ ID NO:X or the complementary strand thereto; the nucleotide sequence as defined in column 5 of Table 1B.1 or columns 8 and 9 of Table 2 or the complementary strand thereto; and a nucleotide sequence encoded by cDNA contained in ATCC™ Deposit No:Z. The nucleic acid molecules can comprise DNA molecules or RNA molecules.

[0721] Also preferred is a composition of matter comprising isolated nucleic acid molecules wherein the nucleotide sequences of said nucleic acid molecules comprise a DNA microarray or “chip” of at least 1, 2, 3, 4, 5, 6, 7, 8, 9, 10, 15, 20, 25, 30, 40, 50, 100, 150, 200, 250, 300, 500, 1000, 2000, 3000, or 4000 nucleotide sequences, wherein at least one sequence in said DNA microarray or “chip” is at least 95% identical to a sequence of at least 50 contiguous nucleotides in a sequence selected from the group consisting of: a nucleotide sequence of SEQ ID NO:X wherein X is any integer as defined in Table 1A and/or 1B; and a nucleotide sequence encoded by a human cDNA clone identified by a cDNA “Clone ID” in Table 1A and/or 1B.

[0722] Also preferred is an isolated polypeptide comprising an amino acid sequence at least 90% identical to a sequence of at least about 10 contiguous amino acids in the polypeptide sequence of SEQ ID NO:Y; a polypeptide encoded by SEQ ID NO:X or the complementary strand thereto; the polypeptide encoded by the nucleotide sequence as defined in columns 8 and 9 of Table 2; and/or a polypeptide encoded by cDNA contained in ATCC™ Deposit No:Z.

[0723] Also preferred is an isolated polypeptide comprising an amino acid sequence at least 95% identical to a sequence of at least about 30 contiguous amino acids in the amino acid sequence of SEQ ID NO:Y; a polypeptide encoded by SEQ ID NO:X or the complementary strand thereto; the polypeptide encoded by the nucleotide sequence as defined in columns 8 and 9 of Table 2; and/or a polypeptide encoded by cDNA contained in ATCC™ Deposit No:Z.

[0724] Further preferred is an isolated polypeptide comprising an amino acid sequence at least 95% identical to a sequence of at least about 100 contiguous amino acids in the amino acid sequence of SEQ ID NO:Y; a polypeptide encoded by SEQ ID NO:X or the complementary strand thereto; the polypeptide encoded by the nucleotide sequence as defined in columns 8 and 9 of Table 2; and/or a polypeptide encoded by cDNA contained in ATCC™ Deposit No:Z.

[0725] Further preferred is an isolated polypeptide comprising an amino acid sequence at least 95% identical to the complete amino acid sequence of SEQ ID NO:Y; a polypeptide encoded by SEQ ID NO:X or the complementary strand thereto; the polypeptide encoded by the nucleotide sequence as defined in columns 8 and 9 of Table 2; and/or a polypeptide encoded by cDNA contained in ATCC™ Deposit No:Z.

[0726] Further preferred is an isolated polypeptide comprising an amino acid sequence at least 90% identical to a sequence of at least about 10 contiguous amino acids in the complete amino acid sequence of a polypeptide encoded by contained in ATCC™ Deposit No:Z

[0727] Also preferred is a polypeptide wherein said sequence of contiguous amino acids is included in the amino acid sequence of a portion of said polypeptide encoded by cDNA contained in ATCC™ Deposit No:Z; a polypeptide encoded by SEQ ID NO:X or the complementary strand thereto; the polypeptide encoded by the nucleotide sequence as defined in columns 8 and 9 of Table 2; and/or the polypeptide sequence of SEQ ID NO:Y.

[0728] Also preferred is an isolated polypeptide comprising an amino acid sequence at least 95% identical to a sequence of at least about 30 contiguous amino acids in the amino acid sequence of a polypeptide encoded by the cDNA contained in ATCC™ Deposit No:Z.

[0729] Also preferred is an isolated polypeptide comprising an amino acid sequence at least 95% identical to a sequence of at least about 100 contiguous amino acids in the amino acid sequence of a polypeptide encoded by cDNA contained in ATCC™ Deposit No:Z.

[0730] Also preferred is an isolated polypeptide comprising an amino acid sequence at least 95% identical to the amino acid sequence of a polypeptide encoded by the cDNA contained in ATCC™ Deposit No:Z.

[0731] Further preferred is an isolated antibody which binds specifically to a polypeptide comprising an amino acid sequence that is at least 90% identical to a sequence of at least 10 contiguous amino acids in a sequence selected from the group consisting of: a polypeptide sequence of SEQ ID NO:Y; a polypeptide encoded by SEQ ID NO:X or the complementary strand thereto; the polypeptide encoded by the nucleotide sequence as defined in columns 8 and 9 of Table 2; and a polypeptide encoded by the cDNA contained in ATCC™ Deposit No:Z.

[0732] Further preferred is a method for detecting in a biological sample a polypeptide comprising an amino acid sequence which is at least 90% identical to a sequence of at least 10 contiguous amino acids in a sequence selected from the group consisting of: a polypeptide sequence of SEQ ID NO:Y; a polypeptide encoded by SEQ ID NO:X or the complementary strand thereto; the polypeptide encoded by the nucleotide sequence as defined in columns 8 and 9 of Table 2; and a polypeptide encoded by the cDNA contained in ATCC™ Deposit No:Z; which method comprises a step of comparing an amino acid sequence of at least one polypeptide molecule in said sample with a sequence selected from said group and determining whether the sequence of said polypeptide molecule in said sample is at least 90% identical to said sequence of at least 10 contiguous amino acids.

[0733] Also preferred is the above method wherein said step of comparing an amino acid sequence of at least one polypeptide molecule in said sample with a sequence selected from said group comprises determining the extent of specific binding of polypeptides in said sample to an antibody which binds specifically to a polypeptide comprising an amino acid sequence that is at least 90% identical to a sequence of at least 10 contiguous amino acids in a sequence selected from the group consisting of: a polypeptide sequence of SEQ ID NO:Y; a polypeptide encoded by SEQ ID NO:X or the complementary strand thereto; the polypeptide encoded by the nucleotide sequence as defined in columns 8 and 9 of Table 2; and a polypeptide encoded by the cDNA contained in ATCC™ Deposit No:Z.

[0734] Also preferred is the above method wherein said step of comparing sequences is performed by comparing the amino acid sequence determined from a polypeptide molecule in said sample with said sequence selected from said group.

[0735] Also preferred is a method for identifying the species, tissue or cell type of a biological sample which method comprises a step of detecting polypeptide molecules in said sample, if any, comprising an amino acid sequence that is at least 90% identical to a sequence of at least 10 contiguous amino acids in a sequence selected from the group consisting of: polypeptide sequence of SEQ ID NO: Y; a polypeptide encoded by SEQ ID NO:X or the complementary strand thereto; the polypeptide encoded by the nucleotide sequence as defined in columns 8 and 9 of Table 2; and a polypeptide encoded by the cDNA contained in ATCC™ Deposit No:Z.

[0736] Also preferred is the above method for identifying the species, tissue or cell type of a biological sample, which method comprises a step of detecting polypeptide molecules comprising an amino acid sequence in a panel of at least two amino acid sequences, wherein at least one sequence in said panel is at least 90% identical to a sequence of at least 10 contiguous amino acids in a sequence selected from the above group.

[0737] Also preferred is a method for diagnosing in a subject a pathological condition associated with abnormal structure or expression of a nucleic acid sequence identified in Table 1A, 1B or Table 2 encoding a polypeptide, which method comprises a step of detecting in a biological sample obtained from said subject polypeptide molecules comprising an amino acid sequence in a panel of at least two amino acid sequences, wherein at least one sequence in said panel is at least 90% identical to a sequence of at least 10 contiguous amino acids in a sequence selected from the group consisting of: polypeptide sequence of SEQ ID NO:Y; a polypeptide encoded by SEQ ID NO:X or the complementary strand thereto; the polypeptide encoded by the nucleotide sequence as defined in columns 8 and 9 of Table 2; and a polypeptide encoded by the cDNA contained in ATCC™ Deposit No:Z.

[0738] In any of these methods, the step of detecting said polypeptide molecules includes using an antibody.

[0739] Also preferred is an isolated nucleic acid molecule comprising a nucleotide sequence which is at least 95% identical to a nucleotide sequence encoding a polypeptide wherein said polypeptide comprises an amino acid sequence that is at least 90% identical to a sequence of at least 10 contiguous amino acids in a sequence selected from the group consisting of: polypeptide sequence of SEQ ID NO:Y; a polypeptide encoded by SEQ ID NO:X or the complementary strand thereto; the polypeptide encoded by the nucleotide sequence as defined in columns 8 and 9 of Table 2; and a polypeptide encoded by the cDNA contained in ATCC™ Deposit No:Z.

[0740] Also preferred is an isolated nucleic acid molecule, wherein said nucleotide sequence encoding a polypeptide has been optimized for expression of said polypeptide in a prokaryotic host.

[0741] Also preferred is a polypeptide molecule, wherein said polypeptide comprises an amino acid sequence selected from the group consisting of: polypeptide sequence of SEQ ID NO:Y; a polypeptide encoded by SEQ ID NO:X or the complementary strand thereto; the polypeptide encoded by the nucleotide sequence as defined in columns 8 and 9 of Table 2; and a polypeptide encoded by the cDNA contained in ATCC™ Deposit No:Z.

[0742] Further preferred is a method of making a recombinant vector comprising inserting any of the above isolated nucleic acid molecule into a vector. Also preferred is the recombinant vector produced by this method. Also preferred is a method of making a recombinant host cell comprising introducing the vector into a host cell, as well as the recombinant host cell produced by this method.

[0743] Also preferred is a method of making an isolated polypeptide comprising culturing this recombinant host cell under conditions such that said polypeptide is expressed and recovering said polypeptide. Also preferred is this method of making an isolated polypeptide, wherein said recombinant host cell is a eukaryotic cell and said polypeptide is a human protein comprising an amino acid sequence selected from the group consisting of: polypeptide sequence of SEQ ID NO:Y; a polypeptide encoded by SEQ ID NO:X or the complementary strand thereto; the polypeptide encoded by the nucleotide sequence as defined in columns 8 and 9 of Table 2; and a polypeptide encoded by the cDNA contained in ATCC™ Deposit No:Z. The isolated polypeptide produced by this method is also preferred.

[0744] Also preferred is a method of treatment of an individual in need of an increased level of a protein activity, which method comprises administering to such an individual a Therapeutic comprising an amount of an isolated polypeptide, polynucleotide, immunogenic fragment or analogue thereof, binding agent, antibody, or antigen binding fragment of the claimed invention effective to increase the level of said protein activity in said individual.

[0745] Also preferred is a method of treatment of an individual in need of a decreased level of a protein activity, which method comprised administering to such an individual a Therapeutic comprising an amount of an isolated polypeptide, polynucleotide, immunogenic fragment or analogue thereof, binding agent, antibody, or antigen binding fragment of the claimed invention effective to decrease the level of said protein activity in said individual.

[0746] Also preferred is a method of treatment of an individual in need of a specific delivery of toxic compositions to diseased cells (e.g., tumors, leukemias or lymphomas), which method comprises administering to such an individual a Therapeutic comprising an amount of an isolated polypeptide of the invention, including, but not limited to a binding agent, or antibody of the claimed invention that are associated with toxin or cytotoxic prodrugs.

[0747] Having generally described the invention, the same will be more readily understood by reference to the following examples, which are provided by way of illustration and are not intended as limiting.

Description of Table 6

[0748] Table 6 summarizes some of the ATCC™ Deposits, Deposit dates, and ATCC™ designation numbers of deposits made with the ATCC™ in connection with the present application. These deposits were made in addition to those described in the Table 1A.

TABLE 6

| | | ATCC ™ Designation |
|---|---|---|
| ATCC ™ Deposits | Deposit Date | Number |
| LP01, LP02, LP03, | May-20-97 | 209059, 209060, 209061, 209062, |
| LP04, LP05, LP06, | | 209063, 209064, 209065, |
| LP07, LP08, LP09, | | 209066, 209067, 209068, 209069 |
| LP10, LP11, | | |
| LP12 | Jan-12-98 | 209579 |
| LP13 | Jan-12-98 | 209578 |
| LP14 | Jul-16-98 | 203067 |
| LP15 | Jul-16-98 | 203068 |
| LP16 | Feb-1-99 | 203609 |
| LP17 | Feb-1-99 | 203610 |
| LP20 | Nov-17-98 | 203485 |
| LP21 | Jun-18-99 | PTA-252 |
| LP22 | Jun-18-99 | PTA-253 |
| LP23 | Dec-22-99 | PTA-1081 |

### EXAMPLES

### Example 1

### Isolation of a Selected cDNA Clone from the Deposited Sample

[0749] Each ATCC™ Deposit No:Z is contained in a plasmid vector. Table 7 identifies the vectors used to construct the cDNA library from which each clone was isolated. In many cases, the vector used to construct the library is a phage vector from which a plasmid has been excised. The following correlates the related plasmid for each phage vector used in constructing the cDNA library. For example, where a particular clone is identified in Table 7 as being isolated in the vector “Lambda Zap,” the corresponding deposited clone is in “pBLUESCRIPT™.”

Vector Used to Construct Library Corresponding Deposited Plasmid

| | |
|---|---|
| Lambda Zap | pBLUESCRIPT ™ (pBS) |
| Uni-Zap XR | pBLUESCRIPT ™ (pBS) |
| Zap Express | pBK |
| lafmid BA | plafmid BA |
| pSport1 | pSport1 |
| pCMVSport 2.0 | pCMVSport 2.0 |
| pCMVSport 3.0 | pCMVSport 3.0 |
| pCR ® 2.1 | pCR ® 2.1 |

[0750] Vectors Lambda Zap (U.S. Pat. Nos. 5,128,256 and 5,286,636), Uni-Zap XR (U.S. Pat. Nos. 5,128,256 and 5,286,636), Zap Express (U.S. Pat. Nos. 5,128,256 and 5,286,636), pBLUESCRIPT™ (pBS) (Short, J. M. et al., Nucleic Acids Res. 16:7583-7600 (1988); Alting-Mees, M. A. and Short, J. M., Nucleic Acids Res. 17:9494 (1989)) and pBK (Alting-Mees, M. A. et al., Strategies 5:58-61 (1992)) are commercially available from Stratagene Cloning Systems, Inc., 11011 N. Torrey Pines Road, La Jolla, Calif., 92037. pBS contains an ampicillin resistance gene and pBK contains a neomycin resistance gene. Both can be transformed into E. coli strain XL-1 Blue, also available from STRATAGENE™. pBS comes in 4 forms SK+, SK−, KS+ and KS. The S and K refers to the orientation of the polylinker to the T7 and T3 primer sequences which flank the polylinker region (“S” is for SacI and “K” is for KpnI which are the first sites on each respective end of the linker). “+” or “−” refer to the orientation of the f1 origin of replication (“ori”), such that in one orientation, single stranded rescue initiated from the f1 ori generates sense strand DNA and in the other, antisense.

[0751] Vectors pSport1, pCMVSport 2.0 and pCMVSport 3.0, were obtained from Life Technologies, Inc., P.O. Box 6009, Gaithersburg, Md. 20897. All Sport vectors contain an ampicillin resistance gene and may be transformed into E. coli strain DH10B, also available from LIFE TECHNOLOGIES™. (See, for instance, Gruber, C. E., et al., Focus 15:59 (1993)). Vector lafmid BA (Bento Soares, Columbia University, NY) contains an ampicillin resistance gene and can be transformed into E. coli strain XL-I Blue. Vector pCR®2.1, which is available from Invitrogen, 1600 Faraday Avenue, Carlsbad, Calif. 92008, contains an ampicillin resistance gene and may be transformed into E. coli strain DH10B, available from LIFETECHNOLOGIES™. (See, for instance, Clark, J. M., Nuc. Acids Res. 16:9677-9686 (1988) and Mead, D. et al., Bio/Technology 9: (1991)). Preferably, a polynucleotide of the present invention does not comprise the phage vector sequences identified for the particular clone in Table 7, as well as the corresponding plasmid vector sequences designated above.

[0752] The deposited material in the sample assigned the ATCC™ Deposit Number cited by reference to Table 1A, Table 2, Table 6 and Table 7 for any given cDNA clone also may contain one or more additional plasmids, each comprising a cDNA clone different from that given clone. Thus, deposits sharing the same ATCC™ Deposit Number contain at least a plasmid for each ATCC™ Deposit No:Z.

TABLE 7

| | | | ATCC ™ |
|---|---|---|---|
| Libraries owned by Catalog | Catalog Description | Vector | Deposit |
| HUKA HUKB HUKC HUKD HUKE HUKF | Human Uterine Cancer | Lambda ZAP II | LP01 |
| HUKG | | | |
| HCNA HCNB | Human Colon | Lambda Zap II | LP01 |
| HFFA | Human Fetal Brain, random primed | Lambda Zap II | LP01 |
| HTWA | Resting T-Cell | Lambda ZAP II | LP01 |
| HBQA | Early Stage Human Brain, random primed | Lambda ZAP II | LP01 |
| HLMB HLMF HLMG HLMH HLMI HLMJ | breast lymph node CDNA library | Lambda ZAP II | LP01 |
| HLMM HLMN | | | |
| HCQA HCQB | human colon cancer | Lamda ZAP II | LP01 |
| HMEA HMEC HMED HMEE HMEF HMEG | Human Microvascular Endothelial Cells, fract. A | Lambda ZAP II | LP01 |
| HMEI HMEJ HMEK HMEL | | | |
| HUSA HUSC | Human Umbilical Vein Endothelial Cells, fract. A | Lambda ZAP II | LP01 |
| HLQA HLQB | Hepatocellular Tumor | Lambda ZAP II | LP01 |
| HHGA HHGB HHGC HHGD | Hemangiopericytoma | Lambda ZAP II | LP01 |
| HSDM | Human Striatum Depression, re-rescue | Lambda ZAP II | LP01 |
| HUSH | H Umbilical Vein Endothelial Cells, frac A, re- | Lambda ZAP II | LP01 |
| | excision | | |
| HSGS | Salivary gland, subtracted | Lambda ZAP II | LP01 |
| HFXA HFXB HFXC HFXD HFXE HFXF | Brain frontal cortex | Lambda ZAP II | LP01 |
| HFXG HFXH | | | |
| HPQA HPQB HPQC | PERM TF274 | Lambda ZAP II | LP01 |
| HFXJ HFXK | Brain Frontal Cortex, re-excision | Lambda ZAP II | LP01 |
| HCWA HCWB HCWC HCWD HCWE HCWF | CD34 positive cells (Cord Blood) | ZAP Express | LP02 |
| HCWG HCWH HCWI HCWJ HCWK | | | |
| HCUA HCUB HCUC | CD34 depleted Buffy Coat (Cord Blood) | ZAP Express | LP02 |
| HRSM | A-14 cell line | ZAP Express | LP02 |
| HRSA | A1-CELL LINE | ZAP Express | LP02 |
| HCUD HCUE HCUF HCUG HCUH HCUI | CD34 depleted Buffy Coat (Cord Blood), re- | ZAP Express | LP02 |
| | excision | | |
| HBXE HBXF HBXG | H. Whole Brain #2, re-excision | ZAP Express | LP02 |
| HRLM | L8 cell line | ZAP Express | LP02 |
| HBXA HBXB HBXC HBXD | Human Whole Brain #2 - Oligo dT >1.5 Kb | ZAP Express | LP02 |
| HUDA HUDB HUDC | Testes | ZAP Express | LP02 |
| HHTM HHTN HHTO | H. hypothalamus, frac A; re-excision | ZAP Express | LP02 |
| HHTL | H. hypothalamus, frac A | ZAP Express | LP02 |
| HASA HASD | Human Adult Spleen | Uni-ZAP XR | LP03 |
| HFKC HFKD HFKE HFKF HFKG | Human Fetal Kidney | Uni-ZAP XR | LP03 |
| HE8A HE8B HE8C HE8D HE8E HE8F HE8M | Human 8 Week Whole Embryo | Uni-ZAP XR | LP03 |
| HE8N | | | |
| HGBA HGBD HGBE HGBF HGBG HGBH | Human Gall Bladder | Uni-ZAP XR | LP03 |
| HGBI | | | |
| HLHA HLHB HLHC HLHD HLHE HLHF | Human Fetal Lung III | Uni-ZAP XR | LP03 |
| HLHG HLHH HLHQ | | | |
| HPMA HPMB HPMC HPMD HPME HPMF | Human Placenta | Uni-ZAP XR | LP03 |
| HPMG HPMH | | | |
| HPRA HPRB HPRC HPRD | Human Prostate | Uni-ZAP XR | LP03 |
| HSIA HSIC HSID HSIE | Human Adult Small Intestine | Uni-ZAP XR | LP03 |
| HTEA HTEB HTEC HTED HTEE HTEF HTEG | Human Testes | Uni-ZAP XR | LP03 |
| HTEH HTEI HTEJ HTEK | | | |
| HTPA HTPB HTPC HTPD HTPE | Human Pancreas Tumor | Uni-ZAP XR | LP03 |
| HTTA HTTB HTTC HTTD HTTE HTTF | Human Testes Tumor | Uni-ZAP XR | LP03 |
| HAPA HAPB HAPC HAPM | Human Adult Pulmonary | Uni-ZAP XR | LP03 |
| HETA HETB HETC HETD HETE HETF HETG | Human Endometrial Tumor | Uni-ZAP XR | LP03 |
| HETH HETI | | | |
| HHFB HHFC HHFD HHFE HHFF HHFG | Human Fetal Heart | Uni-ZAP XR | LP03 |
| HHFH HHFI | | | |
| HHPB HHPC HHPD HHPE HHPF HHPG | Human Hippocampus | Uni-ZAP XR | LP03 |
| HHPH | | | |
| HCE1 HCE2 HCE3 HCE4 HCE5 HCEB HCEC | Human Cerebellum | Uni-ZAP XR | LP03 |
| HCED HCEE HCEF HCEG | | | |
| HUVB HUVC HUVD HUVE | Human Umbilical Vein, Endo. remake | Uni-ZAP XR | LP03 |
| HSTA HSTB HSTC HSTD | Human Skin Tumor | Uni-ZAP XR | LP03 |
| HTAA HTAB HTAC HTAD HTAE | Human Activated T-Cells | Uni-ZAP XR | LP03 |
| HFEA HFEB HFEC | Human Fetal Epithelium (Skin) | Uni-ZAP XR | LP03 |
| HJPA HJPB HJPC HJPD | HUMAN JURKAT MEMBRANE BOUND | Uni-ZAP XR | LP03 |
| | POLYSOMES | | |
| HESA | Human epithelioid sarcoma | Uni-Zap XR | LP03 |
| HLTA HLTB HLTC HLTD HLTE HLTF | Human T-Cell Lymphoma | Uni-ZAP XR | LP03 |
| HFTA HFTB HFTC HFTD | Human Fetal Dura Mater | Uni-ZAP XR | LP03 |
| HRDA HRDB HRDC HRDD HRDE HRDF | Human Rhabdomyosarcoma | Uni-ZAP XR | LP03 |
| HCAA HCAB HCAC | Cem cells cyclohexamide treated | Uni-ZAP XR | LP03 |
| HRGA HRGB HRGC HRGD | Raji Cells, cyclohexamide treated | Uni-ZAP XR | LP03 |
| HSUA HSUB HSUC HSUM | Supt Cells, cyclohexamide treated | Uni-ZAP XR | LP03 |
| HT4A HT4C HT4D | Activated T-Cells, 12 hrs. | Uni-ZAP XR | LP03 |
| HE9A HE9B HE9C HE9D HE9E HE9F HE9G | Nine Week Old Early Stage Human | Uni-ZAP XR | LP03 |
| HE9H HE9M HE9N | | | |
| HATA HATB HATC HATD HATE | Human Adrenal Gland Tumor | Uni-ZAP XR | LP03 |
| HT5A | Activated T-Cells, 24 hrs. | Uni-ZAP XR | LP03 |
| HFGA HFGM | Human Fetal Brain | Uni-ZAP XR | LP03 |
| HNEA HNEB HNEC HNED HNEE | Human Neutrophil | Uni-ZAP XR | LP03 |
| HBGB HBGD | Human Primary Breast Cancer | Uni-ZAP XR | LP03 |
| HBNA HBNB | Human Normal Breast | Uni-ZAP XR | LP03 |
| HCAS | Cem Cells, cyclohexamide treated, subtra | Uni-ZAP XR | LP03 |
| HHPS | Human Hippocampus, subtracted | pBS | LP03 |
| HKCS HKCU | Human Colon Cancer, subtracted | pBS | LP03 |
| HRGS | Raji cells, cyclohexamide treated, subtracted | pBS | LP03 |
| HSUT | Supt cells, cyclohexamide treated, differentially | pBS | LP03 |
| | expressed | | |
| HT4S | Activated T-Cells, 12 hrs, subtracted | Uni-ZAP XR | LP03 |
| HCDA HCDB HCDC HCDD HCDE | Human Chondrosarcoma | Uni-ZAP XR | LP03 |
| HOAA HOAB HOAC | Human Osteosarcoma | Uni-ZAP XR | LP03 |
| HTLA HTLB HTLC HTLD HTLE HTLF | Human adult testis, large inserts | Uni-ZAP XR | LP03 |
| HLMA HLMC HLMD | Breast Lymph node cDNA library | Uni-ZAP XR | LP03 |
| H6EA H6EB H6EC | HL-60, PMA 4 H | Uni-ZAP XR | LP03 |
| HTXA HTXB HTXC HTXD HTXE HTXF | Activated T-Cell (12 hs)/Thiouridine labelledEco | Uni-ZAP XR | LP03 |
| HTXG HTXH | | | |
| HNFA HNFB HNFC HNFD HNFE HNFF | Human Neutrophil, Activated | Uni-ZAP XR | LP03 |
| HNFG HNFH HNFJ | | | |
| HTOB HTOC | HUMAN TONSILS, FRACTION 2 | Uni-ZAP XR | LP03 |
| HMGB | Human OB MG63 control fraction I | Uni-ZAP XR | LP03 |
| HOPB | Human OB HOS control fraction I | Uni-ZAP XR | LP03 |
| HORB | Human OB HOS treated (10 nM E2) fraction I | Uni-ZAP XR | LP03 |
| HSVA HSVB HSVC | Human Chronic Synovitis | Uni-ZAP XR | LP03 |
| HROA | HUMAN STOMACH | Uni-ZAP XR | LP03 |
| HBJA HBJB HBJC HBJD HBJE HBJF HBJG | HUMAN B CELL LYMPHOMA | Uni-ZAP XR | LP03 |
| HBJH HBJI HBJJ HBJK | | | |
| HCRA HCRB HCRC | human corpus colosum | Uni-ZAP XR | LP03 |
| HODA HODB HODC HODD | human ovarian cancer | Uni-ZAP XR | LP03 |
| HDSA | Dermatofibrosarcoma Protuberance | Uni-ZAP XR | LP03 |
| HMWA HMWB HMWC HMWD HMWE | Bone Marrow Cell Line (RS4; 11) | Uni-ZAP XR | LP03 |
| HMWF HMWG HMWH HMWI HMWJ | | | |
| HSOA | stomach cancer (human) | Uni-ZAP XR | LP03 |
| HERA | SKIN | Uni-ZAP XR | LP03 |
| HMDA | Brain-medulloblastoma | Uni-ZAP XR | LP03 |
| HGLA HGLB HGLD | Glioblastoma | Uni-ZAP XR | LP03 |
| HEAA | H. Atrophic Endometrium | Uni-ZAP XR | LP03 |
| HBCA HBCB | H. Lymph node breast Cancer | Uni-ZAP XR | LP03 |
| HPWT | Human Prostate BPH, re-excision | Uni-ZAP XR | LP03 |
| HFVG HFVH HFVI | Fetal Liver, subtraction II | pBS | LP03 |
| HNFI | Human Neutrophils, Activated, re-excision | pBS | LP03 |
| HBMB HBMC HBMD | Human Bone Marrow, re-excision | pBS | LP03 |
| HKML HKMM HKMN | H. Kidney Medulla, re-excision | pBS | LP03 |
| HKIX HKIY | H. Kidney Cortex, subtracted | pBS | LP03 |
| HADT | H. Amygdala Depression, subtracted | pBS | LP03 |
| H6AS | Hl-60, untreated, subtracted | Uni-ZAP XR | LP03 |
| H6ES | HL-60, PMA 4 H, subtracted | Uni-ZAP XR | LP03 |
| H6BS | HL-60, RA 4 h, Subtracted | Uni-ZAP XR | LP03 |
| H6CS | HL-60, PMA 1 d, subtracted | Uni-ZAP XR | LP03 |
| HTXJ HTXK | Activated T-cell(12 h)/Thiouridine-re-excision | Uni-ZAP XR | LP03 |
| HMSA HMSB HMSC HMSD HMSE HMSF | Monocyte activated | Uni-ZAP XR | LP03 |
| HMSG HMSH HMSI HMSJ HMSK | | | |
| HAGA HAGB HAGC HAGD HAGE HAGF | Human Amygdala | Uni-ZAP XR | LP03 |
| HSRA HSRB HSRE | STROMAL - OSTEOCLASTOMA | Uni-ZAP XR | LP03 |
| HSRD HSRF HSRG HSRH | Human Osteoclastoma Stromal Cells - | Uni-ZAP XR | LP03 |
| | unamplified | | |
| HSQA HSQB HSQC HSQD HSQE HSQF | Stromal cell TF274 | Uni-ZAP XR | LP03 |
| HSQG | | | |
| HSKA HSKB HSKC HSKD HSKE HSKF HSKZ | Smooth muscle, serum treated | Uni-ZAP XR | LP03 |
| HSLA HSLB HSLC HSLD HSLE HSLF HSLG | Smooth muscle, control | Uni-ZAP XR | LP03 |
| HSDA HSDD HSDE HSDF HSDG HSDH | Spinal cord | Uni-ZAP XR | LP03 |
| HPWS | Prostate-BPH subtracted II | pBS | LP03 |
| HSKW HSKX HSKY | Smooth Muscle- HASTE normalized | pBS | LP03 |
| HFPB HFPC HFPD | H. Frontal cortex, epileptic; re-excision | Uni-ZAP XR | LP03 |
| HSDI HSDJ HSDK | Spinal Cord, re-excision | Uni-ZAP XR | LP03 |
| HSKN HSKO | Smooth Muscle Serum Treated, Norm | pBS | LP03 |
| HSKG HSKH HSKI | Smooth muscle, serum induced, re-exc | pBS | LP03 |
| HFCA HFCB HFCC HFCD HFCE HFCF | Human Fetal Brain | Uni-ZAP XR | LP04 |
| HPTA HPTB HPTD | Human Pituitary | Uni-ZAP XR | LP04 |
| HTHB HTHC HTHD | Human Thymus | Uni-ZAP XR | LP04 |
| HE6B HE6C HE6D HE6E HE6F HE6G HE6S | Human Whole Six Week Old Embryo | Uni-ZAP XR | LP04 |
| HSSA HSSB HSSC HSSD HSSE HSSF HSSG | Human Synovial Sarcoma | Uni-ZAP XR | LP04 |
| HSSH HSSI HSSJ HSSK | | | |
| HE7T | 7 Week Old Early Stage Human, subtracted | Uni-ZAP XR | LP04 |
| HEPA HEPB HEPC | Human Epididymus | Uni-ZAP XR | LP04 |
| HSNA HSNB HSNC HSNM HSNN | Human Synovium | Uni-ZAP XR | LP04 |
| HPFB HPFC HPFD HPFE | Human Prostate Cancer, Stage C fraction | Uni-ZAP XR | LP04 |
| HE2A HE2D HE2E HE2H HE2I HE2M HE2N | 12 Week Old Early Stage Human | Uni-ZAP XR | LP04 |
| HE2O | | | |
| HE2B HE2C HE2F HE2G HE2P HE2Q | 12 Week Old Early Stage Human, II | Uni-ZAP XR | LP04 |
| HPTS HPTT HPTU | Human Pituitary, subtracted | Uni-ZAP XR | LP04 |
| HAUA HAUB HAUC | Amniotic Cells - TNF induced | Uni-ZAP XR | LP04 |
| HAQA HAQB HAQC HAQD | Amniotic Cells - Primary Culture | Uni-ZAP XR | LP04 |
| HWTA HWTB HWTC | wilm's tumor | Uni-ZAP XR | LP04 |
| HBSD | Bone Cancer, re-excision | Uni-ZAP XR | LP04 |
| HSGB | Salivary gland, re-excision | Uni-ZAP XR | LP04 |
| HSJA HSJB HSJC | Smooth muscle-ILb induced | Uni-ZAP XR | LP04 |
| HSXA HSXB HSXC HSXD | Human Substantia Nigra | Uni-ZAP XR | LP04 |
| HSHA HSHB HSHC | Smooth muscle, IL1b induced | Uni-ZAP XR | LP04 |
| HOUA HOUB HOUC HOUD HOUE | Adipocytes | Uni-ZAP XR | LP04 |
| HPWA HPWB HPWC HPWD HPWE | Prostate BPH | Uni-ZAP XR | LP04 |
| HELA HELB HELC HELD HELE HELF HELG | Endothelial cells-control | Uni-ZAP XR | LP04 |
| HELH | | | |
| HEMA HEMB HEMC HEMD HEME HEMF | Endothelial-induced | Uni-ZAP XR | LP04 |
| HEMG HEMH | | | |
| HBIA HBIB HBIC | Human Brain, Striatum | Uni-ZAP XR | LP04 |
| HHSA HHSB HHSC HHSD HHSE | Human Hypothalmus, Schizophrenia | Uni-ZAP XR | LP04 |
| HNGA HNGB HNGC HNGD HNGE HNGF | neutrophils control | Uni-ZAP XR | LP04 |
| HNGG HNGH HNGI HNGJ | | | |
| HNHA HNHB HNHC HNHD HNHE HNHF | Neutrophils IL-1 and LPS induced | Uni-ZAP XR | LP04 |
| HNHG HNHH HNHI HNHJ | | | |
| HSDB HSDC | STRIATUM DEPRESSION | Uni-ZAP XR | LP04 |
| HHPT | Hypothalamus | Uni-ZAP XR | LP04 |
| HSAT HSAU HSAV HSAW HSAX HSAY | Anergic T-cell | Uni-ZAP XR | LP04 |
| HSAZ | | | |
| HBMS HBMT HBMU HBMV HBMW HBMX | Bone marrow | Uni-ZAP XR | LP04 |
| HOEA HOEB HOEC HOED HOEE HOEF | Osteoblasts | Uni-ZAP XR | LP04 |
| HOEJ | | | |
| HAIA HAIB HAIC HAID HAIE HAIF | Epithelial-TNFa and INF induced | Uni-ZAP XR | LP04 |
| HTGA HTGB HTGC HTGD | Apoptotic T-cell | Uni-ZAP XR | LP04 |
| HMCA HMCB HMCC HMCD HMCE | Macrophage-oxLDL | Uni-ZAP XR | LP04 |
| HMAA HMAB HMAC HMAD HMAE HMAF | Macrophage (GM-CSF treated) | Uni-ZAP XR | LP04 |
| HMAG | | | |
| HPHA | Normal Prostate | Uni-ZAP XR | LP04 |
| HPIA HPIB HPIC | LNCAP prostate cell line | Uni-ZAP XR | LP04 |
| HPJA HPJB HPJC | PC3 Prostate cell line | Uni-ZAP XR | LP04 |
| HOSE HOSF HOSG | Human Osteoclastoma, re-excision | Uni-ZAP XR | LP04 |
| HTGE HTGF | Apoptotic T-cell, re-excision | Uni-ZAP XR | LP04 |
| HMAJ HMAK | H Macrophage (GM-CSF treated), re-excision | Uni-ZAP XR | LP04 |
| HACB HACC HACD | Human Adipose Tissue, re-excision | Uni-ZAP XR | LP04 |
| HFPA | H. Frontal Cortex, Epileptic | Uni-ZAP XR | LP04 |
| HFAA HFAB HFAC HFAD HFAE | Alzheimer's, spongy change | Uni-ZAP XR | LP04 |
| HFAM | Frontal Lobe, Dementia | Uni-ZAP XR | LP04 |
| HMIA HMIB HMIC | Human Manic Depression Tissue | Uni-ZAP XR | LP04 |
| HTSA HTSE HTSF HTSG HTSH | Human Thymus | pBS | LP05 |
| HPBA HPBB HPBC HPBD HPBE | Human Pineal Gland | pBS | LP05 |
| HSAA HSAB HSAC | HSA 172 Cells | pBS | LP05 |
| HSBA HSBB HSBC HSBM | HSC172 cells | pBS | LP05 |
| HJAA HJAB HJAC HJAD | Jurkat T-cell G1 phase | pBS | LP05 |
| HJBA HJBB HJBC HJBD | Jurkat T-Cell, S phase | pBS | LP05 |
| HAFA HAFB | Aorta endothelial cells + TNF-a | pBS | LP05 |
| HAWA HAWB HAWC | Human White Adipose | pBS | LP05 |
| HTNA HTNB | Human Thyroid | pBS | LP05 |
| HONA | Normal Ovary, Premenopausal | pBS | LP05 |
| HARA HARB | Human Adult Retina | pBS | LP05 |
| HLJA HLJB | Human Lung | pCMVSport 1 | LP06 |
| HOFM HOFN HOFO | H. Ovarian Tumor, II, OV5232 | pCMVSport 2.0 | LP07 |
| HOGA HOGB HOGC | OV 10-3-95 | pCMVSport 2.0 | LP07 |
| HCGL | CD34+cells, II | pCMVSport 2.0 | LP07 |
| HDLA | Hodgkin's Lymphoma I | pCMVSport 2.0 | LP07 |
| HDTA HDTB HDTC HDTD HDTE | Hodgkin's Lymphoma II | pCMVSport 2.0 | LP07 |
| HKAA HKAB HKAC HKAD HKAE HKAF | Keratinocyte | pCMVSport2.0 | LP07 |
| HKAG HKAH | | | |
| HCIM | CAPFINDER, Crohn's Disease, lib 2 | pCMVSport 2.0 | LP07 |
| HKAL | Keratinocyte, lib 2 | pCMVSport2.0 | LP07 |
| HKAT | Keratinocyte, lib 3 | pCMVSport2.0 | LP07 |
| HNDA | Nasal polyps | pCMVSport2.0 | LP07 |
| HDRA | H. Primary Dendritic Cells, lib 3 | pCMVSport2.0 | LP07 |
| HOHA HOHB HOHC | Human Osteoblasts II | pCMVSport2.0 | LP07 |
| HLDA HLDB HLDC | Liver, Hepatoma | pCMVSport3.0 | LP08 |
| HLDN HLDO HLDP | Human Liver, normal | pCMVSport3.0 | LP08 |
| HMTA | pBMC stimulated w/ poly I/C | pCMVSport3.0 | LP08 |
| HNTA | NTERA2, control | pCMVSport3.0 | LP08 |
| HDPA HDPB HDPC HDPD HDPF HDPG | Primary Dendritic Cells, lib 1 | pCMVSport3.0 | LP08 |
| HDPH HDPI HDPJ HDPK | | | |
| HDPM HDPN HDPO HDPP | Primary Dendritic cells, frac 2 | pCMVSport3.0 | LP08 |
| HMUA HMUB HMUC | Myoloid Progenitor Cell Line | pCMVSport3.0 | LP08 |
| HHEA HHEB HHEC HHED | T Cell helper I | pCMVSport3.0 | LP08 |
| HHEM HHEN HHEO HHEP | T cell helper II | pCMVSport3.0 | LP08 |
| HEQA HEQB HEQC | Human endometrial stromal cells | pCMVSport3.0 | LP08 |
| HJMA HJMB | Human endometrial stromal cells-treated with | pCMVSport3.0 | LP08 |
| | progesterone | | |
| HSWA HSWB HSWC | Human endometrial stromal cells-treated with | pCMVSport3.0 | LP08 |
| | estradiol | | |
| HSYA HSYB HSYC | Human Thymus Stromal Cells | pCMVSport3.0 | LP08 |
| HLWA HLWB HLWC | Human Placenta | pCMVSport3.0 | LP08 |
| HRAA HRAB HRAC | Rejected Kidney, lib 4 | pCMVSport3.0 | LP08 |
| HMTM | PCR, pBMC I/C treated | PCRII | LP09 |
| HMJA | H. Meniingima, M6 | pSport 1 | LP10 |
| HMKA HMKB HMKC HMKD HMKE | H. Meningima, M1 | pSport 1 | LP10 |
| HUSG HUSI | Human umbilical vein endothelial cells, IL-4 | pSport 1 | LP10 |
| | induced | | |
| HUSX HUSY | Human Umbilical Vein Endothelial Cells, | pSport 1 | LP10 |
| | uninduced | | |
| HOFA | Ovarian Tumor I, OV5232 | pSport 1 | LP10 |
| HCFA HCFB HCFC HCFD | T-Cell PHA 16 hrs | pSport 1 | LP10 |
| HCFL HCFM HCFN HCFO | T-Cell PHA 24 hrs | pSport 1 | LP10 |
| HADA HADC HADD HADE HADF HADG | Human Adipose | pSport 1 | LP10 |
| HOVA HOVB HOVC | Human Ovary | pSport 1 | LP10 |
| HTWB HTWC HTWD HTWE HTWF | Resting T-Cell Library, II | pSport 1 | LP10 |
| HMMA | Spleen metastic melanoma | pSport 1 | LP10 |
| HLYA HLYB HLYC HLYD HLYE | Spleen, Chronic lymphocytic leukemia | pSport 1 | LP10 |
| HCGA | CD34+ cell, I | pSport 1 | LP10 |
| HEOM HEON | Human Eosinophils | pSport 1 | LP10 |
| HTDA | Human Tonsil, Lib 3 | pSport 1 | LP10 |
| HSPA | Salivary Gland, Lib 2 | pSport 1 | LP10 |
| HCHA HCHB HCHC | Breast Cancer cell line, MDA 36 | pSport 1 | LP10 |
| HCHM HCHN | Breast Cancer Cell line, angiogenic | pSport 1 | LP10 |
| HCIA | Crohn's Disease | pSport 1 | LP10 |
| HDAA HDAB HDAC | HEL cell line | pSport 1 | LP10 |
| HABA | Human Astrocyte | pSport 1 | LP10 |
| HUFA HUFB HUFC | Ulcerative Colitis | pSport 1 | LP10 |
| HNTM | NTERA2 + retinoic acid, 14 days | pSport 1 | LP10 |
| HDQA | Primary Dendritic cells, CapFinder2, frac 1 | pSport 1 | LP10 |
| HDQM | Primary Dendritic Cells, CapFinder, frac 2 | pSport 1 | LP10 |
| HLDX | Human Liver, normal, CapFinder | pSport 1 | LP10 |
| HULA HULB HULC | Human Dermal Endothelial Cells, untreated | pSport1 | LP10 |
| HUMA | Human Dermal Endothelial cells, treated | pSport1 | LP10 |
| HCJA | Human Stromal Endometrial fibroblasts, | pSport1 | LP10 |
| | untreated | | |
| HCJM | Human Stromal endometrial fibroblasts, treated | pSport1 | LP10 |
| | w/ estradiol | | |
| HEDA | Human Stromal endometrial fibroblasts, treated | pSport1 | LP10 |
| | with progesterone | | |
| HFNA | Human ovary tumor cell OV350721 | pSport1 | LP10 |
| HKGA HKGB HKGC HKGD | Merkel Cells | pSport1 | LP10 |
| HISA HISB HISC | Pancreas Islet Cell Tumor | pSport1 | LP10 |
| HLSA | Skin, burned | pSport1 | LP10 |
| HBZA | Prostate, BPH, Lib 2 | pSport 1 | LP10 |
| HBZS | Prostate BPH, Lib 2, subtracted | pSport 1 | LP10 |
| HFIA HFIB HFIC | Synovial Fibroblasts (control) | pSport 1 | LP10 |
| HFIH HFII HFIJ | Synovial hypoxia | pSport 1 | LP10 |
| HFIT HFIU HFIV | Synovial IL-1/TNF stimulated | pSport 1 | LP10 |
| HGCA | Messangial cell, frac 1 | pSport1 | LP10 |
| HMVA HMVB HMVC | Bone Marrow Stromal Cell, untreated | pSport1 | LP10 |
| HFIX HFIY HFIZ | Synovial Fibroblasts (Il1/TNF), subt | pSport1 | LP10 |
| HFOX HFOY HFOZ | Synovial hypoxia-RSF subtracted | pSport1 | LP10 |
| HMQA HMQB HMQC HMQD | Human Activated Monocytes | Uni-ZAP XR | LP11 |
| HLIA HLIB HLIC | Human Liver | pCMVSport 1 | LP012 |
| HHBA HHBB HHBC HHBD HHBE | Human Heart | pCMVSport 1 | LP012 |
| HBBA HBBB | Human Brain | pCMVSport 1 | LP012 |
| HLJA HLJB HLJC HLJD HLJE | Human Lung | pCMVSport 1 | LP012 |
| HOGA HOGB HOGC | Ovarian Tumor | pCMVSport 2.0 | LP012 |
| HTJM | Human Tonsils, Lib 2 | pCMVSport 2.0 | LP012 |
| HAMF HAMG | KMH2 | pCMVSport 3.0 | LP012 |
| HAJA HAJB HAJC | L428 | pCMVSport 3.0 | LP012 |
| HWBA HWBB HWBC HWBD HWBE | Dendritic cells, pooled | pCMVSport 3.0 | LP012 |
| HWAA HWAB HWAC HWAD HWAE | Human Bone Marrow, treated | pCMVSport 3.0 | LP012 |
| HYAA HYAB HYAC | B Cell lymphoma | pCMVSport 3.0 | LP012 |
| HWHG HWHH HWHI | Healing groin wound, 6.5 hours post incision | pCMVSport 3.0 | LP012 |
| HWHP HWHQ HWHR | Healing groin wound; 7.5 hours post incision | pCMVSport 3.0 | LP012 |
| HARM | Healing groin wound - zero hr post-incision | pCMVSport 3.0 | LP012 |
| | (control) | | |
| HBIM | Olfactory epithelium; nasalcavity | pCMVSport 3.0 | LP012 |
| HWDA | Healing Abdomen wound; 70&90 min post | pCMVSport 3.0 | LP012 |
| | incision | | |
| HWEA | Healing Abdomen Wound; 15 days post incision | pCMVSport 3.0 | LP012 |
| HWJA | Healing Abdomen Wound; 21&29 days | pCMVSport 3.0 | LP012 |
| HNAL | Human Tongue, frac 2 | pSport1 | LP012 |
| HMJA | H. Meniingima, M6 | pSport1 | LP012 |
| HMKA HMKB HMKC HMKD HMKE | H. Meningima, M1 | pSport1 | LP012 |
| HOFA | Ovarian Tumor I, OV5232 | pSport1 | LP012 |
| HCFA HCFB HCFC HCFD | T-Cell PHA 16 hrs | pSport1 | LP012 |
| HCFL HCFM HCFN HCFO | T-Cell PHA 24 hrs | pSport1 | LP012 |
| HMMA HMMB HMMC | Spleen metastic melanoma | pSport1 | LP012 |
| HTDA | Human Tonsil, Lib 3 | pSport1 | LP012 |
| HDBA | Human Fetal Thymus | pSport1 | LP012 |
| HDUA | Pericardium | pSport1 | LP012 |
| HBZA | Prostate, BPH, Lib 2 | pSport1 | LP012 |
| HWCA | Larynx tumor | pSport1 | LP012 |
| HWKA | Normal lung | pSport1 | LP012 |
| HSMB | Bone marrow stroma, treated | pSport1 | LP012 |
| HBHM | Normal trachea | pSport1 | LP012 |
| HLFC | Human Larynx | pSport1 | LP012 |
| HLRB | Siebben Polyposis | pSport1 | LP012 |
| HNIA | Mammary Gland | pSport1 | LP012 |
| HNJB | Palate carcinoma | pSport1 | LP012 |
| HNKA | Palate normal | pSport1 | LP012 |
| HMZA | Pharynx carcinoma | pSport1 | LP012 |
| HABG | Cheek Carcinoma | pSport1 | LP012 |
| HMZM | Pharynx Carcinoma | pSport1 | LP012 |
| HDRM | Larynx Carcinoma | pSport1 | LP012 |
| HVAA | Pancreas normal PCA4 No | pSport1 | LP012 |
| HICA | Tongue carcinoma | pSport1 | LP012 |
| HUKA HUKB HUKC HUKD HUKE | Human Uterine Cancer | Lambda ZAP II | LP013 |
| HFFA | Human Fetal Brain, random primed | Lambda ZAP II | LP013 |
| HTUA | Activated T-cell labeled with 4-thioluri | Lambda ZAP II | LP013 |
| HBQA | Early Stage Human Brain, random primed | Lambda ZAP II | LP013 |
| HMEB | Human microvascular Endothelial cells, fract. B | Lambda ZAP II | LP013 |
| HUSH | Human Umbilical Vein Endothelial cells, fract. | Lambda ZAP II | LP013 |
| | A, re-excision | | |
| HLQC HLQD | Hepatocellular tumor, re-excision | Lambda ZAP II | LP013 |
| HTWJ HTWK HTWL | Resting T-cell, re-excision | Lambda ZAP II | LP013 |
| HF6S | Human Whole 6 week Old Embryo (II), subt | pBLUESCRIPT ™ | LP013 |
| HHPS | Human Hippocampus, subtracted | pBLUESCRIPT ™ | LP013 |
| HL1S | LNCAP, differential expression | pBLUESCRIPT ™ | LP013 |
| HLHS HLHT | Early Stage Human Lung, Subtracted | pBLUESCRIPT ™ | LP013 |
| HSUS | Supt cells, cyclohexamide treated, subtracted | pBLUESCRIPT ™ | LP013 |
| HSUT | Supt cells, cyclohexamide treated, differentially | pBLUESCRIPT ™ | LP013 |
| | expressed | | |
| HSDS | H. Striatum Depression, subtracted | pBLUESCRIPT ™ | LP013 |
| HPTZ | Human Pituitary, Subtracted VII | pBLUESCRIPT ™ | LP013 |
| HSDX | H. Striatum Depression, subt II | pBLUESCRIPT ™ | LP013 |
| HSDZ | H. Striatum Depression, subt | pBLUESCRIPT ™ | LP013 |
| HPBA HPBB HPBC HPBD HPBE | Human Pineal Gland | pBLUESCRIPT ™ SK- | LP013 |
| HRTA | Colorectal Tumor | pBLUESCRIPT ™ SK- | LP013 |
| HSBA HSBB HSBC HSBM | HSC172 cells | pBLUESCRIPT ™ SK- | LP013 |
| HJAA HJAB HJAC HJAD | Jurkat T-cell G1 phase | pBLUESCRIPT ™ SK- | LP013 |
| HJBA HJBB HJBC HJBD | Jurkat T-cell, S1 phase | pBLUESCRIPT ™ SK- | LP013 |
| HTNA HTNB | Human Thyroid | pBLUESCRIPT ™ SK- | LP013 |
| HAHA HAHB | Human Adult Heart | Uni-ZAP XR | LP013 |
| HE6A | Whole 6 week Old Embryo | Uni-ZAP XR | LP013 |
| HFCA HFCB HFCC HFCD HFCE | Human Fetal Brain | Uni-ZAP XR | LP013 |
| HFKC HFKD HFKE HFKF HFKG | Human Fetal Kidney | Uni-ZAP XR | LP013 |
| HGBA HGBD HGBE HGBF HGBG | Human Gall Bladder | Uni-ZAP XR | LP013 |
| HPRA HPRB HPRC HPRD | Human Prostate | Uni-ZAP XR | LP013 |
| HTEA HTEB HTEC HTED HTEE | Human Testes | Uni-ZAP XR | LP013 |
| HTTA HTTB HTTC HTTD HTTE | Human Testes Tumor | Uni-ZAP XR | LP013 |
| HYBA HYBB | Human Fetal Bone | Uni-ZAP XR | LP013 |
| HFLA | Human Fetal Liver | Uni-ZAP XR | LP013 |
| HHFB HHFC HHFD HHFE HHFF | Human Fetal Heart | Uni-ZAP XR | LP013 |
| HUVB HUVC HUVD HUVE | Human Umbilical Vein, End. remake | Uni-ZAP XR | LP013 |
| HTHB HTHC HTHD | Human Thymus | Uni-ZAP XR | LP013 |
| HSTA HSTB HSTC HSTD | Human Skin Tumor | Uni-ZAP XR | LP013 |
| HTAA HTAB HTAC HTAD HTAE | Human Activated T-cells | Uni-ZAP XR | LP013 |
| HFEA HFEB HFEC | Human Fetal Epithelium (skin) | Uni-ZAP XR | LP013 |
| HJPA HJPB HJPC HJPD | Human Jurkat Membrane Bound Polysomes | Uni-ZAP XR | LP013 |
| HESA | Human Epithelioid Sarcoma | Uni-ZAP XR | LP013 |
| HALS | Human Adult Liver, Subtracted | Uni-ZAP XR | LP013 |
| HFTA HFTB HFTC HFTD | Human Fetal Dura Mater | Uni-ZAP XR | LP013 |
| HCAA HCAB HCAC | Cem cells, cyclohexamide treated | Uni-ZAP XR | LP013 |
| HRGA HRGB HRGC HRGD | Raji Cells, cyclohexamide treated | Uni-ZAP XR | LP013 |
| HE9A HE9B HE9C HE9D HE9E | Nine Week Old Early Stage Human | Uni-ZAP XR | LP013 |
| HSFA | Human Fibrosarcoma | Uni-ZAP XR | LP013 |
| HATA HATB HATC HATD HATE | Human Adrenal Gland Tumor | Uni-ZAP XR | LP013 |
| HTRA | Human Trachea Tumor | Uni-ZAP XR | LP013 |
| HE2A HE2D HE2E HE2H HE2I | 12 Week Old Early Stage Human | Uni-ZAP XR | LP013 |
| HE2B HE2C HE2F HE2G HE2P | 12 Week Old Early Stage Human, II | Uni-ZAP XR | LP013 |
| HNEA HNEB HNEC HNED HNEE | Human Neutrophil | Uni-ZAP XR | LP013 |
| HBGA | Human Primary Breast Cancer | Uni-ZAP XR | LP013 |
| HPTS HPTT HPTU | Human Pituitary, subtracted | Uni-ZAP XR | LP013 |
| HMQA HMQB HMQC HMQD | Human Activated Monocytes | Uni-ZAP XR | LP013 |
| HOAA HOAB HOAC | Human Osteosarcoma | Uni-ZAP XR | LP013 |
| HTOA HTOD HTOE HTOF HTOG | human tonsils | Uni-ZAP XR | LP013 |
| HMGB | Human OB MG63 control fraction I | Uni-ZAP XR | LP013 |
| HOPB | Human OB HOS control fraction I | Uni-ZAP XR | LP013 |
| HOQB | Human OB HOS treated (1 nM E2) fraction I | Uni-ZAP XR | LP013 |
| HAUA HAUB HAUC | Amniotic Cells - TNF induced | Uni-ZAP XR | LP013 |
| HAQA HAQB HAQC HAQD | Amniotic Cells - Primary Culture | Uni-ZAP XR | LP013 |
| HROA HROC | HUMAN STOMACH | Uni-ZAP XR | LP013 |
| HBJA HBJB HBJC HBJD HBJE | HUMAN B CELL LYMPHOMA | Uni-ZAP XR | LP013 |
| HODA HODB HODC HODD | human ovarian cancer | Uni-ZAP XR | LP013 |
| HCPA | Corpus Callosum | Uni-ZAP XR | LP013 |
| HSOA | stomach cancer (human) | Uni-ZAP XR | LP013 |
| HERA | SKIN | Uni-ZAP XR | LP013 |
| HMDA | Brain-medulloblastoma | Uni-ZAP XR | LP013 |
| HGLA HGLB HGLD | Glioblastoma | Uni-ZAP XR | LP013 |
| HWTA HWTB HWTC | wilm's tumor | Uni-ZAP XR | LP013 |
| HEAA | H. Atrophic Endometrium | Uni-ZAP XR | LP013 |
| HAPN HAPO HAPP HAPQ HAPR | Human Adult Pulmonary; re-excision | Uni-ZAP XR | LP013 |
| HLTG HLTH | Human T-cell lymphoma; re-excision | Uni-ZAP XR | LP013 |
| HAHC HAHD HAHE | Human Adult Heart; re-excision | Uni-ZAP XR | LP013 |
| HAGA HAGB HAGC HAGD HAGE | Human Amygdala | Uni-ZAP XR | LP013 |
| HSJA HSJB HSJC | Smooth muscle-ILb induced | Uni-ZAP XR | LP013 |
| HSHA HSHB HSHC | Smooth muscle, IL1b induced | Uni-ZAP XR | LP013 |
| HPWA HPWB HPWC HPWD HPWE | Prostate BPH | Uni-ZAP XR | LP013 |
| HPIA HPIB HPIC | LNCAP prostate cell line | Uni-ZAP XR | LP013 |
| HPJA HPJB HPJC | PC3 Prostate cell line | Uni-ZAP XR | LP013 |
| HBTA | Bone Marrow Stroma, TNF&LPS ind | Uni-ZAP XR | LP013 |
| HMCF HMCG HMCH HMCI HMCJ | Macrophage-oxLDL; re-excision | Uni-ZAP XR | LP013 |
| HAGG HAGH HAGI | Human Amygdala; re-excision | Uni-ZAP XR | LP013 |
| HACA | H. Adipose Tissue | Uni-ZAP XR | LP013 |
| HKFB | K562 + PMA (36 hrs), re-excision | ZAP Express | LP013 |
| HCWT HCWU HCWV | CD34 positive cells (cord blood), re-ex | ZAP Express | LP013 |
| HBWA | Whole brain | ZAP Express | LP013 |
| HBXA HBXB HBXC HBXD | Human Whole Brain #2 - Oligo dT >1.5 Kb | ZAP Express | LP013 |
| HAVM | Temporal cortex-Alzheizmer | pT-Adv | LP014 |
| HAVT | Hippocampus, Alzheimer Subtracted | pT-Adv | LP014 |
| HHAS | CHME Cell Line | Uni-ZAP XR | LP014 |
| HAJR | Larynx normal | pSport 1 | LP014 |
| HWLE HWLF HWLG HWLH | Colon Normal | pSport 1 | LP014 |
| HCRM HCRN HCRO | Colon Carcinoma | pSport 1 | LP014 |
| HWLI HWLJ HWLK | Colon Normal | pSport 1 | LP014 |
| HWLQ HWLR HWLS HWLT | Colon Tumor | pSport 1 | LP014 |
| HBFM | Gastrocnemius Muscle | pSport 1 | LP014 |
| HBOD HBOE | Quadriceps Muscle | pSport 1 | LP014 |
| HBKD HBKE | Soleus Muscle | pSport 1 | LP014 |
| HCCM | Pancreatic Langerhans | pSport 1 | LP014 |
| HWGA | Larynx carcinoma | pSport 1 | LP014 |
| HWGM HWGN | Larynx carcinoma | pSport 1 | LP014 |
| HWLA HWLB HWLC | Normal colon | pSport 1 | LP014 |
| HWLM HWLN | Colon Tumor | pSport 1 | LP014 |
| HVAM HVAN HVAO | Pancreas Tumor | pSport 1 | LP014 |
| HWGQ | Larynx carcinoma | pSport 1 | LP014 |
| HAQM HAQN | Salivary Gland | pSport 1 | LP014 |
| HASM | Stomach; normal | pSport 1 | LP014 |
| HBCM | Uterus; normal | pSport 1 | LP014 |
| HCDM | Testis; normal | pSport 1 | LP014 |
| HDJM | Brain; normal | pSport 1 | LP014 |
| HEFM | Adrenal Gland, normal | pSport 1 | LP014 |
| HBAA | Rectum normal | pSport 1 | LP014 |
| HFDM | Rectum tumour | pSport 1 | LP014 |
| HGAM | Colon, normal | pSport 1 | LP014 |
| HHMM | Colon, tumour | pSport 1 | LP014 |
| HCLB HCLC | Human Lung Cancer | Lambda Zap II | LP015 |
| HRLA | LI Cell line | ZAP Express | LP015 |
| HHAM | Hypothalamus, Alzheimer's | pCMVSport 3.0 | LP015 |
| HKBA | Ku 812F Basophils Line | pSport 1 | LP015 |
| HS2S | Saos2, Dexamethosome Treated | pSport 1 | LP016 |
| HA5A | Lung Carcinoma A549 TNFalpha activated | pSport 1 | LP016 |
| HTFM | TF-1 Cell Line GM-CSF Treated | pSport 1 | LP016 |
| HYAS | Thyroid Tumour | pSport 1 | LP016 |
| HUTS | Larynx Normal | pSport 1 | LP016 |
| HXOA | Larynx Tumor | pSport 1 | LP016 |
| HEAH | Ea.hy.926 cell line | pSport 1 | LP016 |
| HINA | Adenocarcinoma Human | pSport 1 | LP016 |
| HRMA | Lung Mesothelium | pSport 1 | LP016 |
| HLCL | Human Pre-Differentiated Adipocytes | Uni-Zap XR | LP017 |
| HS2A | Saos2 Cells | pSport 1 | LP020 |
| HS2I | Saos2 Cells; Vitamin D3 Treated | pSport 1 | LP020 |
| HUCM | CHME Cell Line, untreated | pSport 1 | LP020 |
| HEPN | Aryepiglottis Normal | pSport 1 | LP020 |
| HPSN | Sinus Piniformis Tumour | pSport 1 | LP020 |
| HNSA | Stomach Normal | pSport 1 | LP020 |
| HNSM | Stomach Tumour | pSport 1 | LP020 |
| HNLA | Liver Normal Met5No | pSport 1 | LP020 |
| HUTA | Liver Tumour Met 5 Tu | pSport 1 | LP020 |
| HOCN | Colon Normal | pSport 1 | LP020 |
| HOCT | Colon Tumor | pSport 1 | LP020 |
| HTNT | Tongue Tumour | pSport 1 | LP020 |
| HLXN | Larynx Normal | pSport 1 | LP020 |
| HLXT | Larynx Tumour | pSport 1 | LP020 |
| HTYN | Thymus | pSport 1 | LP020 |
| HPLN | Placenta | pSport 1 | LP020 |
| HTNG | Tongue Normal | pSport 1 | LP020 |
| HZAA | Thyroid Normal (SDCA2 No) | pSport 1 | LP020 |
| HWES | Thyroid Thyroiditis | pSport 1 | LP020 |
| HFHD | Ficolled Human Stromal Cells, 5Fu treated | pTrip1Ex2 | LP021 |
| HFHM, HFHN | Ficolled Human Stromal Cells, Untreated | pTrip1Ex2 | LP021 |
| HPCI | Hep G2 Cells, lambda library | lambda Zap-CMV XR | LP021 |
| HBCA, HBCB, HBCC | H. Lymph node breast Cancer | Uni-ZAP XR | LP021 |
| HCOK | Chondrocytes | pSPORT1 | LP022 |
| HDCA, HDCB, HDCC | Dendritic Cells From CD34 Cells | pSPORT1 | LP022 |
| HDMA, HDMB | CD40 activated monocyte dendritic cells | pSPORT1 | LP022 |
| HDDM, HDDN, HDDO | LPS activated derived dendritic cells | pSPORT1 | LP022 |
| HPCR | Hep G2 Cells, PCR library | lambda Zap-CMV XR | LP022 |
| HAAA, HAAB, HAAC | Lung, Cancer (4005313A3): Invasive Poorly | pSPORT1 | LP022 |
| | Differentiated Lung Adenocarcinoma | | |
| HIPA, HIPB, HIPC | Lung, Cancer (4005163 B7): Invasive, Poorly | pSPORT1 | LP022 |
| | Diff. Adenocarcinoma, Metastatic | | |
| HOOH, HOOI | Ovary, Cancer: (4004562 B6) Papillary Serous | pSPORT1 | LP022 |
| | Cystic Neoplasm, Low Malignant Pot | | |
| HIDA | Lung, Normal: (4005313 B1) | pSPORT1 | LP022 |
| HUJA, HUJB, HUJC, HUJD, HUJE | B-Cells | pCMVSport 3.0 | LP022 |
| HNOA, HNOB, HNOC, HNOD | Ovary, Normal: (9805C040R) | pSPORT1 | LP022 |
| HNLM | Lung, Normal: (4005313 B1) | pSPORT1 | LP022 |
| HSCL | Stromal Cells | pSPORT1 | LP022 |
| HAAX | Lung, Cancer: (4005313 A3) Invasive Poorly- | pSPORT1 | LP022 |
| | differentiated Metastatic lung adenocarcinoma | | |
| HUUA, HUUB, HUUC, HUUD | B-cells (unstimulated) | pTrip1Ex2 | LP022 |
| HWWA, HWWB, HWWC, HWWD, HWWE, | B-cells (stimulated) | pSPORT1 | LP022 |
| HWWF, HWWG | | | |
| HCCC | Colon, Cancer: (9808C064R) | pCMVSport 3.0 | LP023 |
| HPDO HPDP HPDQ HPDR HPD | Ovary, Cancer (9809C332): Poorly differentiated | pSport 1 | LP023 |
| | adenocarcinoma | | |
| HPCO HPCP HPCQ HPCT | Ovary, Cancer (15395A1F): Grade II Papillary | pSport 1 | LP023 |
| | Carcinoma | | |
| HOCM HOCO HOCP HOCQ | Ovary, Cancer: (15799A1F) Poorly differentiated | pSport 1 | LP023 |
| | carcinoma | | |
| HCBM HCBN HCBO | Breast, Cancer: (4004943 A5) | pSport 1 | LP023 |
| HNBT HNBU HNBV | Breast, Normal: (4005522B2) | pSport 1 | LP023 |
| HBCP HBCQ | Breast, Cancer: (4005522 A2) | pSport 1 | LP023 |
| HBCJ | Breast, Cancer: (9806C012R) | pSport 1 | LP023 |
| HSAM HSAN | Stromal cells 3.88 | pSport 1 | LP023 |
| HVCA HVCB HVCC HVCD | Ovary, Cancer: (4004332 A2) | pSport 1 | LP023 |
| HSCK HSEN HSEO | Stromal cells (HBM3.18) | pSport 1 | LP023 |
| HSCP HSCQ | stromal cell clone 2.5 | pSport 1 | LP023 |
| HUXA | Breast Cancer: (4005385 A2) | pSport 1 | LP023 |
| HCOM HCON HCOO HCOP HCOQ | Ovary, Cancer (4004650 A3): Well- | pSport 1 | LP023 |
| | Differentiated Micropapillary Serous Carcinoma | | |
| HBNM | Breast, Cancer: (9802C020E) | pSport 1 | LP023 |
| HVVA HVVB HVVC HVVD HVVE | Human Bone Marrow, treated | pSport 1 | LP023 |

[0753] Two nonlimiting examples are provided below for isolating a particular clone from the deposited sample of plasmid cDNAs cited for that clone in Table 7. First, a plasmid is directly isolated by screening the clones using a polynucleotide probe corresponding to the nucleotide sequence of SEQ ID NO:X.

[0754] Particularly, a specific polynucleotide with 30-40 nucleotides is synthesized using an Applied Biosystems DNA synthesizer according to the sequence reported. The oligonucleotide is labeled, for instance, with ³²P-γ-ATP using T4 polynucleotide kinase and purified according to routine methods. (E.g., Maniatis et al., Molecular Cloning: A Laboratory Manual, Cold Spring Harbor Press, Cold Spring, N.Y. (1982)). The plasmid mixture is transformed into a suitable host, as indicated above (such as XL-1 Blue (STRATAGENE™)) using techniques known to those of skill in the art, such as those provided by the vector supplier or in related publications or patents cited above. The transformants are plated on 1.5% agar plates (containing the appropriate selection agent, e.g., ampicillin) to a density of about 150 transformants (colonies) per plate. These plates are screened using Nylon membranes according to routine methods for bacterial colony screening (e.g., Sambrook et al., Molecular Cloning: A Laboratory Manual, 2nd Edit., (1989), Cold Spring Harbor Laboratory Press, pages 1.93 to 1.104), or other techniques known to those of skill in the art.

[0755] Alternatively, two primers of 17-20 nucleotides derived from both ends of the nucleotide sequence of SEQ ID NO:X are synthesized and used to amplify the desired cDNA using the deposited cDNA plasmid as a template. The polymerase chain reaction is carried out under routine conditions, for instance, in 25 μl of reaction mixture with 0.5 μg of the above cDNA template. A convenient reaction mixture is 1.5-5 mM MgCl₂, 0.01% (w/v) gelatin, 20 μM each of dATP, dCTP, dGTP, dTTP, 25 pmol of each primer and 0.25 Unit of Taq polymerase. Thirty five cycles of PCR (denaturation at 94° C. for 1 min; annealing at 55° C. for 1 min; elongation at 72° C. for 1 min) are performed with a Perkin-Elmer Cetus automated thermal cycler. The amplified product is analyzed by agarose gel electrophoresis and the DNA band with expected molecular weight is excised and purified. The PCR product is verified to be the selected sequence by subcloning and sequencing the DNA product.

[0756] Several methods are available for the identification of the 5′ or 3′ non-coding portions of a gene which may not be present in the deposited clone. These methods include but are not limited to, filter probing, clone enrichment using specific probes, and protocols similar or identical to 5′ and 3′ “RACE” protocols which are well known in the art. For instance, a method similar to 5′ RACE is available for generating the missing 5′ end of a desired full-length transcript (Fromont-Racine et al., Nucleic Acids Res. 21(7):1683-1684 (1993)).

[0757] Briefly, a specific RNA oligonucleotide is ligated to the 5′ ends of a population of RNA presumably containing full-length gene RNA transcripts. A primer set containing a primer specific to the ligated RNA oligonucleotide and a primer specific to a known sequence of the gene of interest is used to PCR amplify the 5′ portion of the desired full-length gene. This amplified product may then be sequenced and used to generate the full length gene.

[0758] This above method starts with total RNA isolated from the desired source, although poly-A+ RNA can be used. The RNA preparation can then be treated with phosphatase if necessary to eliminate 5′ phosphate groups on degraded or damaged RNA which may interfere with the later RNA ligase step. The phosphatase should then be inactivated and the RNA treated with tobacco acid pyrophosphatase in order to remove the cap structure present at the 5′ ends of messenger RNAs. This reaction leaves a 5′ phosphate group at the 5′ end of the cap cleaved RNA which can then be ligated to an RNA oligonucleotide using T4 RNA ligase.

[0759] This modified RNA preparation is used as a template for first strand cDNA synthesis using a gene specific oligonucleotide. The first strand synthesis reaction is used as a template for PCR amplification of the desired 5′ end using a primer specific to the ligated RNA oligonucleotide and a primer specific to the known sequence of the gene of interest. The resultant product is then sequenced and analyzed to confirm that the 5′ end sequence belongs to the desired gene.

### Example 2

### Isolation of Genomic Clones Corresponding to a Polynucleotide

[0760] A human genomic P1 library (Genomic Systems, Inc.) is screened by PCR using primers selected for the sequence corresponding to SEQ ID NO:X according to the method described in Example 1. (See also, Sambrook.)

### Example 3

### Tissue Specific Expression Analysis

[0761] The Human Genome Sciences, Inc. (HGS) database is derived from sequencing tissue and/or disease specific cDNA libraries. Libraries generated from a particular tissue are selected and the specific tissue expression pattern of EST groups or assembled contigs within these libraries is determined by comparison of the expression patterns of those groups or contigs within the entire database. ESTs and assembled contigs which show tissue specific expression are selected.

[0762] The original clone from which the specific EST sequence was generated, or in the case of an assembled contig, the clone from which the 5′ most EST sequence was generated, is obtained from the catalogued library of clones and the insert amplified by PCR using methods known in the art. The PCR product is denatured and then transferred in 96 or 384 well format to a nylon membrane (Schleicher and Scheull) generating an array filter of tissue specific clones. Housekeeping genes, maize genes, and known tissue specific genes are included on the filters. These targets can be used in signal normalization and to validate assay sensitivity. Additional targets are included to monitor probe length and specificity of hybridization.

[0763] Radioactively labeled hybridization probes are generated by first strand cDNA synthesis per the manufacturer's instructions (LIFE TECHNOLOGIES™) from mRNA/RNA samples prepared from the specific tissue being analyzed (e.g., prostate, prostate cancer, ovarian, ovarian cancer, etc.). The hybridization probes are purified by gel exclusion chromatography, quantitated, and hybridized with the array filters in hybridization bottles at 65° C. overnight. The filters are washed under stringent conditions and signals are captured using a Fuji phosphorimager.

[0764] Data is extracted using AIS software and following background subtraction, signal normalization is performed. This includes a normalization of filter-wide expression levels between different experimental runs. Genes that are differentially expressed in the tissue of interest are identified.

### Example 4

### Chromosomal Mapping of the Polynucleotides

[0765] An oligonucleotide primer set is designed according to the sequence at the 5′ end of SEQ ID NO:X. This primer preferably spans about 100 nucleotides. This primer set is then used in a polymerase chain reaction under the following set of conditions: 30 seconds, 95° C.; 1 minute, 56° C.; 1 minute, 70° C. This cycle is repeated 32 times followed by one 5 minute cycle at 70° C. Human, mouse, and hamster DNA is used as template in addition to a somatic cell hybrid panel containing individual chromosomes or chromosome fragments (Bios, Inc). The reactions are analyzed on either 8% polyacrylamide gels or 3.5% agarose gels. Chromosome mapping is determined by the presence of an approximately 100 bp PCR fragment in the particular somatic cell hybrid.

### Example 5

### Bacterial Expression of a Polypeptide

[0766] A polynucleotide encoding a polypeptide of the present invention is amplified using PCR oligonucleotide primers corresponding to the 5′ and 3′ ends of the DNA sequence, as outlined in Example 1, to synthesize insertion fragments. The primers used to amplify the cDNA insert should preferably contain restriction sites, such as BamHI and XbaI, at the 5′ end of the primers in order to clone the amplified product into the expression vector. For example, BamHI and XbaI correspond to the restriction enzyme sites on the bacterial expression vector pQE-9. (Qiagen, Inc., Chatsworth, Calif.). This plasmid vector encodes antibiotic resistance (Amp^{r}), a bacterial origin of replication (ori), an IPTG-regulatable promoter/operator (P/O), a ribosome binding site (RBS), a 6-histidine tag (6-His), and restriction enzyme cloning sites.

[0767] The pQE-9 vector is digested with BamHI and XbaI and the amplified fragment is ligated into the pQE-9 vector maintaining the reading frame initiated at the bacterial RBS. The ligation mixture is then used to transform the E. coli strain M15/rep4 (Qiagen, Inc.) which contains multiple copies of the plasmid pREP4, which expresses the lacI repressor and also confers kanamycin resistance (Kan^{r}). Transformants are identified by their ability to grow on LB plates and ampicillin/kanamycin resistant colonies are selected. Plasmid DNA is isolated and confirmed by restriction analysis.

[0768] Clones containing the desired constructs are grown overnight (O/N) in liquid culture in LB media supplemented with both Amp (100 μg/ml) and Kan (25 μg/ml). The O/N culture is used to inoculate a large culture at a ratio of 1:100 to 1:250. The cells are grown to an optical density 600 (O.D.⁶⁰⁰) of between 0.4 and 0.6. IPTG (Isopropyl-B-D-thiogalacto pyranoside) is then added to a final concentration of 1 mM. IPTG induces by inactivating the lacI repressor, clearing the P/O leading to increased gene expression.

[0769] Cells are grown for an extra 3 to 4 hours. Cells are then harvested by centrifugation (20 min at 6000×g). The cell pellet is solubilized in the chaotropic agent 6 Molar Guanidine HCl by stirring for 34 hours at 4° C. The cell debris is removed by centrifugation, and the supernatant containing the polypeptide is loaded onto a nickel-nitrilo-tri-acetic acid (“Ni-NTA”) affinity resin column (available from QIAGEN, Inc., supra). Proteins with a 6×His tag bind to the Ni-NTA resin with high affinity and can be purified in a simple one-step procedure (for details see: The QIAexpressionist (1995) QIAGEN, Inc., supra).

[0770] Briefly, the supernatant is loaded onto the column in 6 M guanidine-HCl, pH 8. The column is first washed with 10 volumes of 6 M guanidine-HCl, pH 8, then washed with 10 volumes of 6 M guanidine-HCl pH 6, and finally the polypeptide is eluted with 6 M guanidine-HCl, pH 5.

[0771] The purified protein is then renatured by dialyzing it against phosphate-buffered saline (PBS) or 50 mM Na-acetate, pH 6 buffer plus 200 mM NaCl. Alternatively, the protein can be successfully refolded while immobilized on the Ni-NTA column. The recommended conditions are as follows: renature using a linear 6M-1M urea gradient in 500 mM NaCl, 20% glycerol, 20 mM Tris/HCl pH 7.4, containing protease inhibitors. The renaturation should be performed over a period of 1.5 hours or more. After renaturation the proteins are eluted by the addition of 250 mM immidazole. Immidazole is removed by a final dialyzing step against PBS or 50 mM sodium acetate pH 6 buffer plus 200 mM NaCl. The purified protein is stored at 4° C. or frozen at −80° C.

[0772] In addition to the above expression vector, the present invention further includes an expression vector, called pHE4a (ATCC™ Accession Number 209645, deposited on Feb. 25, 1998) which contains phage operator and promoter elements operatively linked to a polynucleotide of the present invention, called pHE4a (ATCC™ Accession Number 209645, deposited on Feb. 25, 1998.) This vector contains: 1) a neomycinphosphotransferase gene as a selection marker, 2) an E. coli origin of replication, 3) a T5 phage promoter sequence, 4) two lac operator sequences, 5) a Shine-Delgarno sequence, and 6) the lactose operon repressor gene (lacIq). The origin of replication (oriC) is derived from pUC19 (LTI, Gaithersburg, Md.). The promoter and operator sequences are made synthetically.

[0773] DNA can be inserted into the pHE4a by restricting the vector with NdeI and XbaI, BamHI, XhoI, or Asp718, running the restricted product on a gel, and isolating the larger fragment (the stuffer fragment should be about 310 base pairs). The DNA insert is generated according to the PCR protocol described in Example 1, using PCR primers having restriction sites for NdeI (5′ primer) and XbaI, BamHI, XhoI, or Asp718 (3′ primer). The PCR insert is gel purified and restricted with compatible enzymes. The insert and vector are ligated according to standard protocols.

[0774] The engineered vector could easily be substituted in the above protocol to express protein in a bacterial system.

### Example 6

### Purification of a Polypeptide from an Inclusion Body

[0775] The following alternative method can be used to purify a polypeptide expressed in E. coli when it is present in the form of inclusion bodies. Unless otherwise specified, all of the following steps are conducted at 4-10° C.

[0776] Upon completion of the production phase of the E. coli fermentation, the cell culture is cooled to 4-10° C. and the cells harvested by continuous centrifugation at 15,000 rpm (Heraeus Sepatech). On the basis of the expected yield of protein per unit weight of cell paste and the amount of purified protein required, an appropriate amount of cell paste, by weight, is suspended in a buffer solution containing 100 mM Tris, 50 mM EDTA, pH 7.4. The cells are dispersed to a homogeneous suspension using a high shear mixer.

[0777] The cells are then lysed by passing the solution through a microfluidizer (Microfuidics, Corp. or APV Gaulin, Inc.) twice at 4000-6000 psi. The homogenate is then mixed with NaCl solution to a final concentration of 0.5 M NaCl, followed by centrifugation at 7000×g for 15 min. The resultant pellet is washed again using 0.5M NaCl, 100 mM Tris, 50 mM EDTA, pH 7.4.

[0778] The resulting washed inclusion bodies are solubilized with 1.5 M guanidine hydrochloride (GuHCl) for 2-4 hours. After 7000×g centrifugation for 15 min., the pellet is discarded and the polypeptide containing supernatant is incubated at 4° C. overnight to allow further GuHCl extraction.

[0779] Following high speed centrifugation (30,000×g) to remove insoluble particles, the GuHCl solubilized protein is refolded by quickly mixing the GuHCl extract with 20 volumes of buffer containing 50 mM sodium, pH 4.5, 150 mM NaCl, 2 mM EDTA by vigorous stirring. The refolded diluted protein solution is kept at 4° C. without mixing for 12 hours prior to further purification steps.

[0780] To clarify the refolded polypeptide solution, a previously prepared tangential filtration unit equipped with 0.16 μm membrane filter with appropriate surface area (e.g., Filtron), equilibrated with 40 mM sodium acetate, pH 6.0 is employed. The filtered sample is loaded onto a cation exchange resin (e.g., Poros HS-50, Perseptive Biosystems). The column is washed with 40 mM sodium acetate, pH 6.0 and eluted with 250 mM, 500 mM, 1000 mM, and 1500 mM NaCl in the same buffer, in a stepwise manner. The absorbance at 280 nm of the effluent is continuously monitored. Fractions are collected and further analyzed by SDS-PAGE.

[0781] Fractions containing the polypeptide are then pooled and mixed with 4 volumes of water. The diluted sample is then loaded onto a previously prepared set of tandem columns of strong anion (Poros HQ-50, Perseptive Biosystems) and weak anion (Poros CM-20, Perseptive Biosystems) exchange resins. The columns are equilibrated with 40 mM sodium acetate, pH 6.0. Both columns are washed with 40 mM sodium acetate, pH 6.0, 200 mM NaCl. The CM-20 column is then eluted using a 10 column volume linear gradient ranging from 0.2 M NaCl, 50 mM sodium acetate, pH 6.0 to 1.0 M NaCl, 50 mM sodium acetate, pH 6.5. Fractions are collected under constant A₂₈₀ monitoring of the effluent. Fractions containing the polypeptide (determined, for instance, by 16% SDS-PAGE) are then pooled.

[0782] The resultant polypeptide should exhibit greater than 95% purity after the above refolding and purification steps. No major contaminant bands should be observed from Commassie blue stained 16% SDS-PAGE gel when 5 μg of purified protein is loaded. The purified protein can also be tested for endotoxin/LPS contamination, and typically the LPS content is less than 0.1 ng/ml according to LAL assays.

### Example 7

### Cloning and Expression of a Polypeptide in a Baculovirus Expression System

[0783] In this example, the plasmid shuttle vector pA2 is used to insert a polynucleotide into a baculovirus to express a polypeptide. This expression vector contains the strong polyhedrin promoter of the Autographa californica nuclear polyhedrosis virus (AcMNPV) followed by convenient restriction sites such as BamHI, Xba I and Asp718. The polyadenylation site of the simian virus 40 (“SV40”) is used for efficient polyadenylation. For easy selection of recombinant virus, the plasmid contains the beta-galactosidase gene from E. coli under control of a weak Drosophila promoter in the same orientation, followed by the polyadenylation signal of the polyhedrin gene. The inserted genes are flanked on both sides by viral sequences for cell-mediated homologous recombination with wild-type viral DNA to generate a viable virus that express the cloned polynucleotide.

[0784] Many other baculovirus vectors can be used in place of the vector above, such as pAc373, pVL941, and pAcIM1, as one skilled in the art would readily appreciate, as long as the construct provides appropriately located signals for transcription, translation, secretion and the like, including a signal peptide and an in-frame AUG as required. Such vectors are described, for instance, in Luckow et al., Virology 170:31-39 (1989).

[0785] Specifically, the cDNA sequence contained in the deposited clone, including the AUG initiation codon, is amplified using the PCR protocol described in Example 1. If a naturally occurring signal sequence is used to produce the polypeptide of the present invention, the pA2 vector does not need a second signal peptide. Alternatively, the vector can be modified (pA2 GP) to include a baculovirus leader sequence, using the standard methods described in Summers et al., “A Manual of Methods for Baculovirus Vectors and Insect Cell Culture Procedures,” Texas Agricultural Experimental Station Bulletin No. 1555 (1987).

[0786] The amplified fragment is isolated from a 1% agarose gel using a commercially available kit (“GENECLEAN™,” BIO 101 Inc., La Jolla, Calif.). The fragment then is digested with appropriate restriction enzymes and again purified on a 1% agarose gel.

[0787] The plasmid is digested with the corresponding restriction enzymes and optionally, can be dephosphorylated using calf intestinal phosphatase, using routine procedures known in the art. The DNA is then isolated from a 1% agarose gel using a commercially available kit (“GENECLEAN™” BIO 101 Inc., La Jolla, Calif.).

[0788] The fragment and the dephosphorylated plasmid are ligated together with T4 DNA ligase. E. coli HB101 or other suitable E. coli hosts such as XL-I Blue (Stratagene Cloning Systems, La Jolla, Calif.) cells are transformed with the ligation mixture and spread on culture plates. Bacteria containing the plasmid are identified by digesting DNA from individual colonies and analyzing the digestion product by gel electrophoresis. The sequence of the cloned fragment is confirmed by DNA sequencing.

[0789] Five μg of a plasmid containing the polynucleotide is co-transfected with 1.0 μg of a commercially available linearized baculovirus DNA (“BaculoGold™ baculovirus DNA, Pharmingen, San Diego, Calif.), using the lipofection method described by Felgner et al., Proc. Natl. Acad. Sci. USA 84:7413-7417 (1987). One μg of BaculoGold™ virus DNA and 5 μg of the plasmid are mixed in a sterile well of a microtiter plate containing 50 μl of serum-free Grace's medium (LIFE TECHNOLOGIES™ Inc., Gaithersburg, Md.). Afterwards, 10 μl LIPOFECTIN™ plus 90 μl Grace's medium are added, mixed and incubated for 15 minutes at room temperature. Then the transfection mixture is added drop-wise to Sf9 insect cells (ATCC™ CRL 1711) seeded in a 35 mm tissue culture plate with 1 ml Grace's medium without serum. The plate is then incubated for 5 hours at 27° C. The transfection solution is then removed from the plate and 1 ml of Grace's insect medium supplemented with 10% fetal calf serum is added. Cultivation is then continued at 27° C. for four days.

[0790] After four days the supernatant is collected and a plaque assay is performed, as described by Summers and Smith, supra. An agarose gel with “Blue Gal” (LIFE TECHNOLOGIES™ Inc., Gaithersburg) is used to allow easy identification and isolation of gal-expressing clones, which produce blue-stained plaques. (A detailed description of a “plaque assay” of this type can also be found in the user's guide for insect cell culture and baculovirology distributed by LIFE TECHNOLOGIES™ Inc., Gaithersburg, page 9-10.) After appropriate incubation, blue stained plaques are picked with the tip of a micropipettor (e.g., Eppendorf). The agar containing the recombinant viruses is then resuspended in a microcentrifuge tube containing 200 μl of Grace's medium and the suspension containing the recombinant baculovirus is used to infect Sf9 cells seeded in 35 mm dishes. Four days later the supernatants of these culture dishes are harvested and then they are stored at 4° C.

[0791] To verify the expression of the polypeptide, Sf9 cells are grown in Grace's medium supplemented with 10% heat-inactivated FBS. The cells are infected with the recombinant baculovirus containing the polynucleotide at a multiplicity of infection (“MOI”) of about 2. If radiolabeled proteins are desired, 6 hours later the medium is removed and is replaced with SF900 II medium minus methionine and cysteine (available from LIFE TECHNOLOGIES™ Inc., Rockville, Md.). After 42 hours, 5 μCi of ³⁵S-methionine and 5 μCi ³⁵S-cysteine (available from Amersham) are added. The cells are further incubated for 16 hours and then are harvested by centrifugation. The proteins in the supernatant as well as the intracellular proteins are analyzed by SDS-PAGE followed by autoradiography (if radiolabeled).

[0792] Microsequencing of the amino acid sequence of the amino terminus of purified protein may be used to determine the amino terminal sequence of the produced protein.

### Example 8

### Expression of a Polypeptide in Mammalian Cells

[0793] The polypeptide of the present invention can be expressed in a mammalian cell. A typical mammalian expression vector contains a promoter element, which mediates the initiation of transcription of mRNA, a protein coding sequence, and signals required for the termination of transcription and polyadenylation of the transcript. Additional elements include enhancers, Kozak sequences and intervening sequences flanked by donor and acceptor sites for RNA splicing. Highly efficient transcription is achieved with the early and late promoters from SV40, the long terminal repeats (LTRs) from Retroviruses, e.g., RSV, HTLVI, HIVI and the early promoter of the cytomegalovirus (CMV). However, cellular elements can also be used (e.g., the human actin promoter).

[0794] Suitable expression vectors for use in practicing the present invention include, for example, vectors such as pSVL and pMSG (PHARMACIA™, Uppsala, Sweden), pRSVcat (ATCC™ 37152), pSV2dhfr (ATCC™ 37146), pBC12MI (ATCC™ 67109), pCMVSport 2.0, and pCMVSport 3.0. Mammalian host cells that could be used include, human Hela, 293, H9 and Jurkat cells, mouse NIH3T3 and C127 cells, Cos 1, Cos 7 and CVI, quail QCI-3 cells, mouse L cells and Chinese hamster ovary (CHO) cells.

[0795] Alternatively, the polypeptide can be expressed in stable cell lines containing the polynucleotide integrated into a chromosome. The co-transfection with a selectable marker such as DHFR, gpt, neomycin, or hygromycin allows the identification and isolation of the transfected cells.

[0796] The transfected gene can also be amplified to express large amounts of the encoded protein. The DHFR (dihydrofolate reductase) marker is useful in developing cell lines that carry several hundred or even several thousand copies of the gene of interest. (See, e.g., Alt, F. W., et al., J. Biol. Chem. 253:1357-1370 (1978); Hamlin, J. L. and Ma, C., Biochem. et Biophys. Acta, 1097:107-143 (1990); Page, M. J. and Sydenham, M. A., Biotechnology 9:64-68 (1991)). Another useful selection marker is the enzyme glutamine synthase (GS) (Murphy et al., Biochem J. 227:277-279 (1991); Bebbington et al., Bio/Technology 10:169-175 (1992). Using these markers, the mammalian cells are grown in selective medium and the cells with the highest resistance are selected. These cell lines contain the amplified gene(s) integrated into a chromosome. Chinese hamster ovary (CHO) and NSO cells are often used for the production of proteins.

[0797] Derivatives of the plasmid pSV2-dhfr (ATCC™ Accession No. 37146), the expression vectors pC4 (ATCC™ Accession No. 209646) and pC6 (ATCC™ Accession No. 209647) contain the strong promoter (LTR) of the Rous Sarcoma Virus (Cullen et al., Molecular and Cellular Biology, 438-447 (March, 1985)) plus a fragment of the CMV-enhancer (Boshart et al., Cell 41:521-530 (1985)). Multiple cloning sites, e.g., with the restriction enzyme cleavage sites BamHI, XbaI and Asp718, facilitate the cloning of the gene of interest. The vectors also contain the 3′ intron, the polyadenylation and termination signal of the rat preproinsulin gene, and the mouse DHFR gene under control of the SV40 early promoter.

[0798] Specifically, the plasmid pC6, for example, is digested with appropriate restriction enzymes and then dephosphorylated using calf intestinal phosphates by procedures known in the art. The vector is then isolated from a 1% agarose gel.

[0799] A polynucleotide of the present invention is amplified according to the protocol outlined in Example 1. If a naturally occurring signal sequence is used to produce the polypeptide of the present invention, the vector does not need a second signal peptide. Alternatively, if a naturally occurring signal sequence is not used, the vector can be modified to include a heterologous signal sequence. (See, e.g., International Publication No. WO 96/34891.)

[0800] The amplified fragment is isolated from a 1% agarose gel using a commercially available kit (“GENECLEAN™,” BIO 101 Inc., La Jolla, Calif.). The fragment then is digested with appropriate restriction enzymes and again purified on a 1% agarose gel.

[0801] The amplified fragment is then digested with the same restriction enzyme and purified on a 1% agarose gel. The isolated fragment and the dephosphorylated vector are then ligated with T4 DNA ligase. E. coli HB101 or XL-1 Blue cells are then transformed and bacteria are identified that contain the fragment inserted into plasmid pC6 using, for instance, restriction enzyme analysis.

[0802] Chinese hamster ovary cells lacking an active DHFR gene is used for transfection. Five μg of the expression plasmid pC6 or pC4 is cotransfected with 0.5 μg of the plasmid pSVneo using LIPOFECTIN™ (Felgner et al., supra). The plasmid pSV2-neo contains a dominant selectable marker, the neo gene from Tn5 encoding an enzyme that confers resistance to a group of antibiotics including G418. The cells are seeded in alpha minus MEM supplemented with 1 mg/ml G418. After 2 days, the cells are trypsinized and seeded in hybridoma cloning plates (Greiner, Germany) in alpha minus MEM supplemented with 10, 25, or 50 ng/ml of methotrexate plus 1 mg/ml G418. After about 10-14 days single clones are trypsinized and then seeded in 6-well petri dishes or 10 ml flasks using different concentrations of methotrexate (50 nM, 100 nM, 200 nM, 400 nM, 800 nM). Clones growing at the highest concentrations of methotrexate are then transferred to new 6-well plates containing even higher concentrations of methotrexate (1 μM, 2 μM, 5 μM, 10 mM, 20 mM). The same procedure is repeated until clones are obtained which grow at a concentration of 100-200 μM. Expression of the desired gene product is analyzed, for instance, by SDS-PAGE and Western blot or by reversed phase HPLC analysis.

### Example 9

### Protein Fusions

[0803] The polypeptides of the present invention are preferably fused to other proteins. These fusion proteins can be used for a variety of applications. For example, fusion of the present polypeptides to His-tag, HA-tag, protein A, IgG domains, and maltose binding protein facilitates purification. (See Example 5; see also EP A 394,827; Traunecker, et al., Nature 331:84-86 (1988)). Similarly, fusion to IgG-1, IgG-3, and albumin increases the halflife time in vivo. Nuclear localization signals fused to the polypeptides of the present invention can target the protein to a specific subcellular localization, while covalent heterodimer or homodimers can increase or decrease the activity of a fusion protein. Fusion proteins can also create chimeric molecules having more than one function. Finally, fusion proteins can increase solubility and/or stability of the fused protein compared to the non-fused protein. All of the types of fusion proteins described above can be made by modifying the following protocol, which outlines the fusion of a polypeptide to an IgG molecule, or the protocol described in Example 5.

[0804] Briefly, the human Fc portion of the IgG molecule can be PCR amplified, using primers that span the 5′ and 3′ ends of the sequence described below. These primers also should have convenient restriction enzyme sites that will facilitate cloning into an expression vector, preferably a mammalian expression vector.

[0805] For example, if pC4 (ATCC™ Accession No. 209646) is used, the human Fc portion can be ligated into the BamHI cloning site. Note that the 3′ BamHI site should be destroyed. Next, the vector containing the human Fc portion is re-restricted with BamHI, linearizing the vector, and a polynucleotide of the present invention, isolated by the PCR protocol described in Example 1, is ligated into this BamHI site. Note that the polynucleotide is cloned without a stop codon, otherwise a fusion protein will not be produced.

[0806] If the naturally occurring signal sequence is used to produce the polypeptide of the present invention, pC4 does not need a second signal peptide. Alternatively, if the naturally occurring signal sequence is not used, the vector can be modified to include a heterologous signal sequence. (See, e.g., International Publication No. WO 96/34891.)

[0807] Human IgG Fc region:

(SEQ ID NO:1)
GGGATCCGGAGCCCAAATCTTCTGACAAAACTCACACATGCCCACCGTGCCCAGCACCTGAATTCGAGGGTGCACCGTCAGTCTT
CCTCTTCCCCCCAAAACCCAAGGACACCCTCATGATCTCCCGGACTCCTGAGGTCACATGCGTGGTGGTGGACGTAAGCCACGAA
GACCCTGAGGTCAAGTTCAACTGGTACGTGGACGGCGTGGAGGTGCATAATGCCAAGACAAAGCCGCGGGAGGAGCAGTACAA
CAGCACGTACCGTGTGGTCAGCGTCCTCACCGTCCTGCACCAGGACTGGCTGAATGGCAAGGAGTACAAGTGCAAGGTCTCCAA
CAAAGCCCTCCCAACCCCCATCGAGAAAACCATCTCCAAAGCCAAAGGGCAGCCCCGAGAACCACAGGTGTACACCCTGCCCCC
ATCCCGGGATGAGCTGACCAAGAACCAGGTCAGCCTGACCTGCCTGGTCAAAGGCTTCTATCCAAGCGACATCGCCGTGGAGTG
GGAGAGCAATGGGCAGCCGGAGAACAACTACAAGACCACGCCTCCCGTGCTGGACTCCGACGGCTCCTTCTTCCTCTACAGCAA
GCTCACCGTGGACAAGAGCACCTGGCAGCAGGGGAACGTCTTCTCATGCTCCGTGATGCATGAGGCTCTGCACAACCACTACAC
GCAGAAGAGCCTCTCCCTGTCTCCGGGTAAATGAGTGCGACGGCCGCGACTCTAGAGGAT

### Example 10

### Production of an Antibody from a Polypeptide

Hybridoma Technology

[0808] The antibodies of the present invention can be prepared by a variety of methods. (See, Current Protocols, Chapter 2.) As one example of such methods, cells expressing a polypeptide of the present invention are administered to an animal to induce the production of sera containing polyclonal antibodies. In a preferred method, a preparation of a polypeptide of the present invention is prepared and purified to render it substantially free of natural contaminants. Such a preparation is then introduced into an animal in order to produce polyclonal antisera of greater specific activity.

[0809] Monoclonal antibodies specific for a polypeptide of the present invention are prepared using hybridoma technology (Kohler et al., Nature 256:495 (1975); Kohler et al., Eur. J. Immunol. 6:511 (1976); Kohler et al., Eur. J. Immunol. 6:292 (1976); Hammerling et al., in: Monoclonal Antibodies and T-Cell Hybridomas, Elsevier, N.Y., pp. 563-681 (1981)). In general, an animal (preferably a mouse) is immunized with a polypeptide of the present invention or, more preferably, with a secreted polypeptide-expressing cell. Such polypeptide-expressing cells are cultured in any suitable tissue culture medium, preferably in Earle's modified Eagle's medium supplemented with 10% fetal bovine serum (inactivated at about 56° C.), and supplemented with about 10 g/l of nonessential amino acids, about 1,000 U/ml of penicillin, and about 100 μg/ml of streptomycin.

[0810] The splenocytes of such mice are extracted and fused with a suitable myeloma cell line. Any suitable myeloma cell line may be employed in accordance with the present invention; however, it is preferable to employ the parent myeloma cell line (SP20), available from the ATCC™. After fusion, the resulting hybridoma cells are selectively maintained in HAT medium, and then cloned by limiting dilution as described by Wands et al. (Gastroenterology 80:225-232 (1981)). The hybridoma cells obtained through such a selection are then assayed to identify clones which secrete antibodies capable of binding the polypeptide of the present invention.

[0811] Alternatively, additional antibodies capable of binding to a polypeptide of the present invention can be produced in a two-step procedure using anti-idiotypic antibodies. Such a method makes use of the fact that antibodies are themselves antigens, and therefore, it is possible to obtain an antibody which binds to a second antibody. In accordance with this method, protein specific antibodies are used to immunize an animal, preferably a mouse. The splenocytes of such an animal are then used to produce hybridoma cells, and the hybridoma cells are screened to identify clones which produce an antibody whose ability to bind to the polypeptide-specific antibody can be blocked by said polypeptide. Such antibodies comprise anti-idiotypic antibodies to the polypeptide-specific antibody and are used to immunize an animal to induce formation of further polypeptide-specific antibodies.

[0812] For in vivo use of antibodies in humans, an antibody is “humanized”. Such antibodies can be produced using genetic constructs derived from hybridoma cells producing the monoclonal antibodies described above. Methods for producing chimeric and humanized antibodies are known in the art and are discussed herein. (See, for review, Morrison, Science 229:1202 (1985); Oi et al., BioTechniques 4:214 (1986); Cabilly et al., U.S. Pat. No. 4,816,567; Taniguchi et al., EP 171496; Morrison et al., EP 173494; Neuberger et al., WO 8601533; Robinson et al., International Publication No. WO 8702671; Boulianne et al., Nature 312:643 (1984); Neuberger et al., Nature 314:268 (1985)).

Isolation of Antibody Fragments Directed Against a Polypeptide of the Present Invention from a Library of scFvs

[0813] Naturally occurring V-genes isolated from human PBLs are constructed into a library of antibody fragments which contain reactivities against a polypeptide of the present invention to which the donor may or may not have been exposed (see e.g., U.S. Pat. No. 5,885,793 incorporated herein by reference in its entirety).

[0814] Rescue of the Library. A library of scFvs is constructed from the RNA of human PBLs as described in International Publication No. WO 92/01047. To rescue phage displaying antibody fragments, approximately 10⁹ E. coli harboring the phagemid are used to inoculate 50 ml of 2×TY containing 1% glucose and 100 μg/ml of ampicillin (2×TY-AMP-GLU) and grown to an O.D. of 0.8 with shaking. Five ml of this culture is used to inoculate 50 ml of 2×TY-AMP-GLU, 2×108 TU of delta gene 3 helper (M13 delta gene III, see International Publication No. WO 92/01047) are added and the culture incubated at 37° C. for 45 minutes without shaking and then at 37° C. for 45 minutes with shaking. The culture is centrifuged at 4000 r.p.m. for 10 min. and the pellet resuspended in 2 liters of 2×TY containing 100 μg/ml ampicillin and 50 μg/ml kanamycin and grown overnight Phage are prepared as described in International Publication No. WO 92/01047.

[0815] M13 delta gene III is prepared as follows: M13 delta gene III helper phage does not encode gene III protein, hence the phage(mid) displaying antibody fragments have a greater avidity of binding to antigen. Infectious M13 delta gene III particles are made by growing the helper phage in cells harboring a pUC19 derivative supplying the wild type gene III protein during phage morphogenesis. The culture is incubated for 1 hour at 37° C. without shaking and then for a further hour at 37° C. with shaking. Cells are spun down (IEC-Centra 8,400 r.p.m. for 10 min), resuspended in 300 ml 2×TY broth containing 100 μg ampicillin/ml and 25 μg kanamycin/ml (2×TY-AMP-KAN) and grown overnight, shaking at 37° C. Phage particles are purified and concentrated from the culture medium by two PEG-precipitations (Sambrook et al., 1990), resuspended in 2 ml PBS and passed through a 0.45 μm filter (Minisart NML; Sartorius) to give a final concentration of approximately 10¹³ transducing units/ml (ampicillin-resistant clones).

[0816] Panning of the Library. Immunotubes (Nunc) are coated overnight in PBS with 4 ml of either 100 μg/ml or 10 μg/ml of a polypeptide of the present invention. Tubes are blocked with 2% Marvel-PBS for 2 hours at 37° C. and then washed 3 times in PBS. Approximately 10¹³ TU of phage is applied to the tube and incubated for 30 minutes at room temperature tumbling on an over and under turntable and then left to stand for another 1.5 hours. Tubes are washed 10 times with PBS 0.1% Tween-20 and 10 times with PBS. Phage are eluted by adding 1 ml of 100 mM triethylamine and rotating 15 minutes on an under and over turntable after which the solution is immediately neutralized with 0.5 ml of 1.0M Tris-HCl, pH 7.4. Phage are then used to infect 10 ml of mid-log E. coli TG1 by incubating eluted phage with bacteria for 30 minutes at 37° C. The E. coli are then plated on TYE plates containing 1% glucose and 100 μg/ml ampicillin. The resulting bacterial library is then rescued with delta gene 3 helper phage as described above to prepare phage for a subsequent round of selection. This process is then repeated for a total of 4 rounds of affinity purification with tube-washing increased to 20 times with PBS, 0.1% Tween-20 and 20 times with PBS for rounds 3 and 4.

[0817] Characterization of Binders. Eluted phage from the 3rd and 4th rounds of selection are used to infect E. coli HB 2151 and soluble scFv is produced (Marks, et al., 1991) from single colonies for assay. ELISAs are performed with microtitre plates coated with either 10 pg/ml of the polypeptide of the present invention in 50 mM bicarbonate pH 9.6. Clones positive in ELISA are further characterized by PCR fingerprinting (see, e.g., International Publication No. WO 92/01047) and then by sequencing. These ELISA positive clones may also be further characterized by techniques known in the art, such as, for example, epitope mapping, binding affinity, receptor signal transduction, ability to block or competitively inhibit antibody/antigen binding, and competitive agonistic or antagonistic activity.

### Example 11

### Method of Determining Alterations in a Gene Corresponding to a Polynucleotide

[0818] RNA isolated from entire families or individual patients presenting with an allergic and/or asthmatic disease or disorder is isolated. cDNA is then generated from these RNA samples using protocols known in the art. (See, Sambrook.) The cDNA is then used as a template for PCR, employing primers surrounding regions of interest in SEQ ID NO:X; and/or the nucleotide sequence of the cDNA contained in ATCC™ Deposit No:Z. Suggested PCR conditions consist of 35 cycles at 95 degrees C. for 30 seconds; 60-120 seconds at 52-58 degrees C.; and 60-120 seconds at 70 degrees C., using buffer solutions described in Sidransky et al., Science 252:706 (1991).

[0819] PCR products are then sequenced using primers labeled at their 5′ end with T4 polynucleotide kinase, employing SequiTherm Polymerase (Epicentre Technologies). The intron-exon boundaries of selected exons is also determined and genomic PCR products analyzed to confirm the results. PCR products harboring suspected mutations are then cloned and sequenced to validate the results of the direct sequencing.

[0820] PCR products are cloned into T-tailed vectors as described in Holton et al., Nucleic Acids Research, 19:1156 (1991) and sequenced with T7 polymerase (United States Biochemical). Affected individuals are identified by mutations not present in unaffected individuals.

[0821] Genomic rearrangements are also observed as a method of determining alterations in a gene corresponding to a polynucleotide. Genomic clones isolated according to Example 2 are nick-translated with digoxigenindeoxy-uridine 5′-triphosphate (Boehringer Manheim), and FISH performed as described in Johnson et al., Methods Cell Biol. 35:73-99 (1991). Hybridization with the labeled probe is carried out using a vast excess of human cot-1 DNA for specific hybridization to the corresponding genomic locus.

[0822] Chromosomes are counterstained with 4,6-diamino-2-phenylidole and propidium iodide, producing a combination of C- and R-bands. Aligned images for precise mapping are obtained using a triple-band filter set (Chroma Technology, Brattleboro, Vt.) in combination with a cooled charge-coupled device camera (Photometrics, Tucson, Ariz.) and variable excitation wavelength filters. (Johnson et al., Genet. Anal. Tech. Appl., 8:75 (1991)). Image collection, analysis and chromosomal fractional length measurements are performed using the ISee Graphical Program System. (Inovision Corporation, Durham, N.C.) Chromosome alterations of the genomic region hybridized by the probe are identified as insertions, deletions, and translocations. These alterations are used as a diagnostic marker for an associated disease.

### Example 12

### Method of Detecting Abnormal Levels of a Polypeptide in a Biological Sample

[0823] A polypeptide of the present invention can be detected in a biological sample, and if an increased or decreased level of the polypeptide is detected, this polypeptide is a marker for a particular phenotype. Methods of detection are numerous, and thus, it is understood that one skilled in the art can modify the following assay to fit their particular needs.

[0824] For example, antibody-sandwich ELISAs are used to detect polypeptides in a sample, preferably a biological sample. Wells of a microtiter plate are coated with specific antibodies, at a final concentration of 0.2 to 10 μg/ml. The antibodies are either monoclonal or polyclonal and are produced by the method described in Example 10. The wells are blocked so that non-specific binding of the polypeptide to the well is reduced.

[0825] The coated wells are then incubated for >2 hours at RT with a sample containing the polypeptide. Preferably, serial dilutions of the sample should be used to validate results. The plates are then washed three times with deionized or distilled water to remove unbound polypeptide.

[0826] Next, 50 μl of specific antibody-alkaline phosphatase conjugate, at a concentration of 25-400 ng, is added and incubated for 2 hours at room temperature. The plates are again washed three times with deionized or distilled water to remove unbound conjugate.

[0827] Add 75 μl of 4-methylumbelliferyl phosphate (MUP) or p-nitrophenyl phosphate (NPP) substrate solution to each well and incubate 1 hour at room temperature. Measure the reaction by a microtiter plate reader. Prepare a standard curve, using serial dilutions of a control sample, and plot polypeptide concentration on the X-axis (log scale) and fluorescence or absorbance of the Y-axis (linear scale). Interpolate the concentration of the polypeptide in the sample using the standard curve.

### Example 13

### Formulation

[0828] The invention also provides methods of preventing, treating and/or ameliorating an allergic and/or asthmatic disease or disorder by administration to a subject of an effective amount of a Therapeutic. By therapeutic is meant polynucleotides or polypeptides of the invention (including fragments and variants), agonists or antagonists thereof, and/or antibodies thereto, in combination with a pharmaceutically acceptable carrier type (e.g., a sterile carrier).

[0829] The Therapeutic will be formulated and dosed in a fashion consistent with good medical practice, taking into account the clinical condition of the individual patient (especially the side effects of treatment with the Therapeutic alone), the site of delivery, the method of administration, the scheduling of administration, and other factors known to practitioners. The “effective amount” for purposes herein is thus determined by such considerations.

[0830] As a general proposition, the total pharmaceutically effective amount of the Therapeutic administered parenterally per dose will be in the range of about 1 ug/kg/day to 10 mg/kg/day of patient body weight, although, as noted above, this will be subject to therapeutic discretion. More preferably, this dose is at least 0.01 mg/kg/day, and most preferably for humans between about 0.01 and 1 mg/kg/day for the hormone. If given continuously, the Therapeutic is typically administered at a dose rate of about 1 μg/kg/hour to about 50 μg/kg/hour, either by 14 injections per day or by continuous subcutaneous infusions, for example, using a mini-pump. An intravenous bag solution may also be employed. The length of treatment needed to observe changes and the interval following treatment for responses to occur appears to vary depending on the desired effect.

[0831] Therapeutics can be are administered orally, rectally, parenterally, intracistemally, intravaginally, intraperitoneally, topically (as by powders, ointments, gels, drops or transdermal patch), bucally, or as an oral or nasal spray. “Pharmaceutically acceptable carrier” refers to a non-toxic solid, semisolid or liquid filler, diluent, encapsulating material or formulation auxiliary of any. The term “parenteral” as used herein refers to modes of administration which include intravenous, intramuscular, intraperitoneal, intrastemal, subcutaneous and intraarticular injection and infusion.

[0832] Therapeutics of the invention are also suitably administered by sustained-release systems. Suitable examples of sustained-release Therapeutics are administered orally, rectally, parenterally, intracistemally, intravaginally, intraperitoneally, topically (as by powders, ointments, gels, drops or transdermal patch), bucally, or as an oral or nasal spray. “Pharmaceutically acceptable carrier” refers to a non-toxic solid, semisolid or liquid filler, diluent, encapsulating material or formulation auxiliary of any type. The term “parenteral” as used herein refers to modes of administration which include intravenous, intramuscular, intraperitoneal, intrastemal, subcutaneous and intraarticular injection and infusion.

[0833] Therapeutics of the invention are also suitably administered by sustained-release systems. Suitable examples of sustained-release Therapeutics include suitable polymeric materials (such as, for example, semi-permeable polymer matrices in the form of shaped articles, e.g., films, or mirocapsules), suitable hydrophobic materials (for example as an emulsion in an acceptable oil) or ion exchange resins, and sparingly soluble derivatives (such as, for example, a sparingly soluble salt).

[0834] Sustained-release matrices include polylactides (U.S. Pat. No. 3,773,919, EP 58,481), copolymers of L-glutamic acid and gamma-ethyl-L-glutamate (Sidman et al., Biopolymers 22:547-556 (1983)), poly(2-hydroxyethyl methacrylate) (Langer et al., J. Biomed. Mater. Res. 15:167-277 (1981), and Langer, Chem. Tech. 12:98-105 (1982)), ethylene vinyl acetate (Langer et al., Id.) or poly-D-(−)-3-hydroxybutyric acid (EP 133,988).

[0835] In a preferred embodiment, polypeptide, polynucleotide, and antibody compositions of the invention are formulated in a biodegradable, polymeric drug delivery system, for example as described in U.S. Pat. Nos. 4,938,763; 5,278,201; 5,278,202; 5,324,519; 5,340,849; and 5,487,897 and in International Publication Numbers WO01/35929, WO00/24374, and WO0/06117 which are hereby incorporated by reference in their entirety. In specific preferred embodiments the polypeptide, polynucleotide, and antibody compositions of the invention are formulated using the ATRIGEL® Biodegradable System of Atrix Laboratories, Inc. (Fort Collins, Colo.).

[0836] Examples of biodegradable polymers which can be used in the formulation of polypeptide, polynucleotide, and antibody compositions, include but are not limited to, polylactides, polyglycolides, polycaprolactones, polyanhydrides, polyamides, polyurethanes, polyesteramides, polyorthoesters, polydioxanones, polyacetals, polyketals, polycarbonates, polyorthocarbonates, polyphosphazenes, polyhydroxybutyrates, polyhydroxyvalerates, polyalkylene oxalates, polyalkylene succinates, poly(malic acid), poly(amino acids), poly(methyl vinyl ether), poly(maleic anhydride), polyvinylpyrrolidone, polyethylene glycol, polyhydroxycellulose, chitin, chitosan, and copolymers, terpolymers, or combinations or mixtures of the above materials. The preferred polymers are those that have a lower degree of crystallization and are more hydrophobic. These polymers and copolymers are more soluble in the biocompatible solvents than the highly crystalline polymers such as polyglycolide and chitin which also have a high degree of hydrogen-bonding. Preferred materials with the desired solubility parameters are the polylactides, polycaprolactones, and copolymers of these with glycolide in which there are more amorphous regions to enhance solubility. In specific preferred embodiments, the biodegradable polymers which can be used in the formulation of polypeptide, polynucleotide, and antibody compositions are poly(lactide-co-glycolides). Polymer properties such as molecular weight, hydrophobicity, and lactide/glycolide ratio may be modified to obtain the desired polypeptide, polynucleotide, or antibody release profile (See, e.g., Ravivarapu et al., Journal of Pharmaceutical Sciences 89:732-741 (2000), which is hereby incorporated by reference in its entirety).

[0837] It is also preferred that the solvent for the biodegradable polymer be non-toxic, water miscible, and otherwise biocompatible. Examples of such solvents include, but are not limited to, N-methyl-2-pyrrolidone, 2-pyrrolidone, C2 to C6 alkanols, C1 to C15 alchohols, dils, triols, and tetraols such as ethanol, glycerine propylene glycol, butanol; C3 to C15 alkyl ketones such as acetone, diethyl ketone and methyl ethyl ketone; C3 to C15 esters such as methyl acetate, ethyl acetate, ethyl lactate; alkyl ketones such as methyl ethyl ketone, C1 to C15 amides such as dimethylformamide, dimethylacetamide and caprolactam; C3 to C20 ethers such as tetrahydrofuran, or solketal; tweens, triacetin, propylene carbonate, decylmethylsulfoxide, dimethyl sulfoxide, oleic acid, 1-dodecylazacycloheptan-2-one, Other preferred solvents are benzyl alchohol, benzyl benzoate, dipropylene glycol, tributyrin, ethyl oleate, glycerin, glycofural, isopropyl myristate, isopropyl palmitate, oleic acid, polyethylene glycol, propylene carbonate, and triethyl citrate. The most preferred solvents are N-methyl-2-pyrrolidone, 2-pyrrolidone, dimethyl sulfoxide, triacetin, and propylene carbonate because of the solvating ability and their compatibility.

[0838] Additionally, formulations comprising polypeptide, polynucleotide, and antibody compositions and a biodegradable polymer may also include release-rate modification agents and/or pore-forming agents. Examples of release-rate modification agents include, but are not limited to, fatty acids, triglycerides, other like hydrophobic compounds, organic solvents, plasticizing compounds and hydrophilic compounds. Suitable release rate modification agents include, for example, esters of mono-, di-, and tricarboxylic acids, such as 2-ethoxyethyl acetate, methyl acetate, ethyl acetate, diethyl phthalate, dimethyl phthalate, dibutyl phthalate, dimethyl adipate, dimethyl succinate, dimethyl oxalate, dimethyl citrate, triethyl citrate, acetyl tributyl citrate, acetyl triethyl citrate, glycerol triacetate, di(n-butyl)sebecate, and the like; polyhydroxy alcohols, such as propylene glycol, polyethylene glycol, glycerin, sorbitol, and the like; fatty acids; triesters of glycerol, such as triglycerides, epoxidized soybean oil, and other epoxidized vegetable oils; sterols, such as cholesterol; alcohols, such as C.sub.6-C.sub.12 alkanols, 2-ethoxyethanol. The release rate modification agent may be used singly or in combination with other such agents. Suitable combinations of release rate modification agents include, but are not limited to, glycerin/propylene glycol, sorbitol/glycerine, ethylene oxide/propylene oxide, butylene glycol/adipic acid, and the like. Preferred release rate modification agents include, but are not limited to, dimethyl citrate, triethyl citrate, ethyl heptanoate, glycerin, and hexanediol. Suitable pore-forming agents that may be used in the polymer composition include, but are not limited to, sugars such as sucrose and dextrose, salts such as sodium chloride and sodium carbonate, polymers such as hydroxylpropylcellulose, carboxymethylcellulose, polyethylene glycol, and polyvinylpyrrolidone. Solid crystals that will provide a defined pore size, such as salt or sugar, are preferred.

[0839] In specific preferred embodiments the polypeptide, polynucleotide, and antibody compositions of the invention are formulated using the BEMA™ BioErodible Mucoadhesive System, MCA™ MucoCutaneous Absorption System, SMP™ Solvent MicroParticle System, or BCP™ BioCompatible Polymer System of Atrix Laboratories, Inc. (Fort Collins, Colo.).

[0840] Sustained-release Therapeutics also include liposomally entrapped Therapeutics of the invention (see generally, Langer, Science 249:1527-1533 (1990); Treat et al., in Liposomes in the Therapy of Infectious Disease and Cancer, Lopez-Berestein and Fidler (eds.), Liss, New York, pp. 317-327 and 353-365 (1989)). Liposomes containing the Therapeutic are prepared by methods known per se: DE 3,218,121; Epstein et al., Proc. Natl. Acad. Sci. (USA) 82:3688-3692 (1985); Hwang et al., Proc. Natl. Acad. Sci. (USA) 77:4030-4034 (1980); EP 52,322; EP 36,676; EP 88,046; EP 143,949; EP 142,641; Japanese Pat. Appl. 83-118008; U.S. Pat. Nos. 4,485,045 and 4,544,545; and EP 102,324. Ordinarily, the liposomes are of the small (about 200-800 Angstroms) unilamellar type in which the lipid content is greater than about 30 mol. percent cholesterol, the selected proportion being adjusted for the optimal Therapeutic.

[0841] In yet an additional embodiment, the Therapeutics of the invention are delivered by way of a pump (see Langer, supra; Sefton, CRC Crit. Ref. Biomed. Eng. 14:201 (1987); Buchwald et al., Surgery 88:507 (1980); Saudek et al., N. Engl. J. Med. 321:574 (1989)).

[0842] Other controlled release systems are discussed in the review by Langer (Science 249:1527-1533 (1990)).

[0843] For parenteral administration, in one embodiment, the Therapeutic is formulated generally by mixing it at the desired degree of purity, in a unit dosage injectable form (solution, suspension, or emulsion), with a pharmaceutically acceptable carrier, i.e., one that is non-toxic to recipients at the dosages and concentrations employed and is compatible with other ingredients of the formulation. For example, the formulation preferably does not include oxidizing agents and other compounds that are known to be deleterious to the Therapeutic.

[0844] Generally, the formulations are prepared by contacting the Therapeutic uniformly and intimately with liquid carriers or finely divided solid carriers or both. Then, if necessary, the product is shaped into the desired formulation. Preferably the carrier is a parenteral carrier, more preferably a solution that is isotonic with the blood of the recipient. Examples of such carrier vehicles include water, saline, Ringer's solution, and dextrose solution. Non-aqueous vehicles such as fixed oils and ethyl oleate are also useful herein, as well as liposomes.

[0845] The carrier suitably contains minor amounts of additives such as substances that enhance isotonicity and chemical stability. Such materials are non-toxic to recipients at the dosages and concentrations employed, and include buffers such as phosphate, citrate, succinate, acetic acid, and other organic acids or their salts; antioxidants such as ascorbic acid; low molecular weight (less than about ten residues) polypeptides, e.g., polyarginine or tripeptides; proteins, such as serum albumin, gelatin, or immunoglobulins; hydrophilic polymers such as polyvinylpyrrolidone; amino acids, such as glycine, glutamic acid, aspartic acid, or arginine; monosaccharides, disaccharides, and other carbohydrates including cellulose or its derivatives, glucose, manose, or dextrins; chelating agents such as EDTA; sugar alcohols such as mannitol or sorbitol; counterions such as sodium; and/or nonionic surfactants such as polysorbates, poloxamers, or PEG.

[0846] The Therapeutic is typically formulated in such vehicles at a concentration of about 0.1 mg/ml to 100 mg/ml, preferably 1-10 mg/ml, at a pH of about 3 to 8. It will be understood that the use of certain of the foregoing excipients, carriers, or stabilizers will result in the formation of polypeptide salts.

[0847] Any pharmaceutical used for therapeutic administration can be sterile. Sterility is readily accomplished by filtration through sterile filtration membranes (e.g., 0.2 micron membranes). Therapeutics generally are placed into a container having a sterile access port, for example, an intravenous solution bag or vial having a stopper pierceable by a hypodermic injection needle.

[0848] Therapeutics ordinarily will be stored in unit or multi-dose containers, for example, sealed ampoules or vials, as an aqueous solution or as a lyophilized formulation for reconstitution. As an example of a lyophilized formulation, 10-ml vials are filled with 5 ml of sterile-filtered 1% (w/v) aqueous Therapeutic solution, and the resulting mixture is lyophilized. The infusion solution is prepared by reconstituting the lyophilized Therapeutic using bacteriostatic Water-for-Injection.

[0849] The invention also provides a pharmaceutical pack or kit comprising one or more containers filled with one or more of the ingredients of the Therapeutics of the invention. Associated with such container(s) can be a notice in the form prescribed by a governmental agency regulating the manufacture, use or sale of pharmaceuticals or biological products, which notice reflects approval by the agency of manufacture, use or sale for human administration. In addition, the Therapeutics may be employed in conjunction with other therapeutic compounds.

[0850] The Therapeutics of the invention may be administered alone or in combination with adjuvants. Adjuvants that may be administered with the Therapeutics of the invention include, but are not limited to, alum, alum plus deoxycholate (ImmunoAg), MTP-PE (Biocine Corp.), QS21 (Genentech, Inc.), BCG (e.g., THERACYS®), MPL and nonviable prepartions of Corynebacterium parvum. In a specific embodiment, Therapeutics of the invention are administered in combination with alum. In another specific embodiment, Therapeutics of the invention are administered in combination with QS-21. Further adjuvants that may be administered with the Therapeutics of the invention include, but are not limited to, Monophosphoryl lipid immunomodulator, AdjuVax 100a, QS-21, QS-18, CRL1005, Aluminum salts, MF-59, and Virosomal adjuvant technology. Vaccines that may be administered with the Therapeutics of the invention include, but are not limited to, vaccines directed toward protection against MMR (measles, mumps, rubella), polio, varicella, tetanus/diptheria, hepatitis A, hepatitis B, haemophilus influenzae B, whooping cough, pneumonia, influenza, Lyme's Disease, rotavirus, cholera, yellow fever, Japanese encephalitis, poliomyelitis, rabies, typhoid fever, and pertussis. Combinations may be administered either concomitantly, e.g., as an admixture, separately but simultaneously or concurrently; or sequentially. This includes presentations in which the combined agents are administered together as a therapeutic mixture, and also procedures in which the combined agents are administered separately but simultaneously, e.g., as through separate intravenous lines into the same individual. Administration “in combination” further includes the separate administration of one of the compounds or agents given first, followed by the second.

[0851] The Therapeutics of the invention may be administered alone or in combination with other therapeutic agents. Therapeutic agents that may be administered in combination with the Therapeutics of the invention, include but not limited to, chemotherapeutic agents, antibiotics, steroidal and non-steroidal anti-inflammatories, conventional immunotherapeutic agents, and/or therapeutic treatments described below. Combinations may be administered either concomitantly, e.g., as an admixture, separately but simultaneously or concurrently; or sequentially. This includes presentations in which the combined agents are administered together as a therapeutic mixture, and also procedures in which the combined agents are administered separately but simultaneously, e.g., as through separate intravenous lines into the same individual. Administration “in combination” further includes the separate administration of one of the compounds or agents given first, followed by the second.

[0852] In one embodiment, the Therapeutics of the invention are administered in combination with an anticoagulant. Anticoagulants that may be administered with the compositions of the invention include, but are not limited to, heparin, low molecular weight heparin, warfarin sodium (e.g., COUMADIN®), dicumarol, 4-hydroxycoumarin, anisindione (e.g., MIRADON™), acenocoumarol (e.g., nicoumalone, SINTHROME™), indan-1,3-dione, phenprocoumon (e.g., MARCUMAR™), ethyl biscoumacetate (e.g., TROMEXAN™), and aspirin. In a specific embodiment, compositions of the invention are administered in combination with heparin and/or warfarin. In another specific embodiment, compositions of the invention are administered in combination with warfarin. In another specific embodiment, compositions of the invention are administered in combination with warfarin and aspirin. In another specific embodiment, compositions of the invention are administered in combination with heparin. In another specific embodiment, compositions of the invention are administered in combination with heparin and aspirin.

[0853] In another embodiment, the Therapeutics of the invention are administered in combination with thrombolytic drugs. Thrombolytic drugs that may be administered with the compositions of the invention include, but are not limited to, plasminogen, lys-plasminogen, alpha2-antiplasmin, streptokinae (e.g., KABIKINASE™), antiresplace (e.g., EMINASE™), tissue plasminogen activator (t-PA, altevase, ACTIVASE™), urokinase (e.g., ABBOKINASE™), sauruplase, (Prourokinase, single chain urokinase), and aminocaproic acid (e.g., AMICAR™). In a specific embodiment, compositions of the invention are administered in combination with tissue plasminogen activator and aspirin.

[0854] In another embodiment, the Therapeutics of the invention are administered in combination with antiplatelet drugs. Antiplatelet drugs that may be administered with the compositions of the invention include, but are not limited to, aspirin, dipyridamole (e.g., PERSANTINE™), and ticlopidine (e.g., TICLID™).

[0855] In specific embodiments, the use of anti-coagulants, thrombolytic and/or antiplatelet-drugs in combination with Therapeutics of the invention is contemplated for the detection, prevention, diagnosis, prognostication, treatment, and/or amelioration of thrombosis, arterial thrombosis, venous thrombosis, thromboembolism, pulmonary embolism, atherosclerosis, myocardial infarction, transient ischemic attack, unstable angina. In specific embodiments, the use of anticoagulants, thrombolytic drugs and/or antiplatelet drugs in combination with Therapeutics of the invention is contemplated for the prevention of occulsion of saphenous grafts, for reducing the risk of periprocedural thrombosis as might accompany angioplasty procedures, for reducing the risk of stroke in patients with atrial fibrillation including nonrheumatic atrial fibrillation, for reducing the risk of embolism associated with mechanical heart valves and or mitral valves disease. Other uses for the therapeutics of the invention, alone or in combination with antiplatelet, anticoagulant, and/or thrombolytic drugs, include, but are not limited to, the prevention of occlusions in extracorporeal devices (e.g., intravascular canulas, vascular access shunts in hemodialysis patients, hemodialysis machines, and cardiopulmonary bypass machines).

[0856] In certain embodiments, Therapeutics of the invention are administered in combination with antiretroviral agents, nucleoside/nucleotide reverse transcriptase inhibitors (NRTIs), non-nucleoside reverse transcriptase inhibitors (NNRTIs), and/or protease inhibitors (PIs). NRTIs that may be administered in combination with the Therapeutics of the invention, include, but are not limited to, RETROVIR™ (zidovudine/AZT), VIDEX™ (didanosine/ddI), HIVID™ (zalcitabine/ddC), ZERIT™ (stavudine/d4T), EPIVIR™ (lamivudine/3TC), and COMBIVIR™ (zidovudine/lamivudine). NNRTIs that may be administered in combination with the Therapeutics of the invention, include, but are not limited to, VIRAMUNE™ (nevirapine), RESCRIPTOR™ (delavirdine), and SUSTIVA™ (efavirenz). Protease inhibitors that may be administered in combination with the Therapeutics of the invention, include, but are not limited to, CRIXIVAN™ (indinavir), NORVIR™ (ritonavir), INVIRASE™ (saquinavir), and VIRACEPT™ (nelfinavir). In a specific embodiment, antiretroviral agents, nucleoside reverse transcriptase inhibitors, non-nucleoside reverse transcriptase inhibitors, and/or protease inhibitors may be used in any combination with Therapeutics of the invention to treat AIDS and/or to prevent or treat HIV infection.

[0857] Additional NRTIs include LODENOSINE™ (F-ddA; an acid-stable adenosine NRTI; Triangle/Abbott; COVIRACIL™ (emtricitabine/FTC; structurally related to lamivudine (3TC) but with 3- to 10-fold greater activity in vitro; Triangle/Abbon); dOTC (BCH-10652, also structurally related to lamivudine but retains activity against a substantial proportion of lamivudine-resistant isolates; Biochem Pharma); Adefovir (refused approval for anti-HIV therapy by FDA; Gilead Sciences); PREVEON® (Adefovir Dipivoxil, the active prodrug of adefovir; its active form is PMEA-pp); TENOFOVIR™ (bis-POC PMPA, a PMPA prodrug; Gilead); DAPD/DXG (active metabolite of DAPD; Triangle/Abbott); D-D4FC (related to 3TC, with activity against AZT/3TC-resistant virus); GW420867X (Glaxo Wellcome); ZIAGEN™ (abacavir/159U89; Glaxo Wellcome Inc.); CS-87 (3′azido-2′,3′-dideoxyuridine; WO 99/66936); and S-acyl-2-thioethyl (SATE)-bearing prodrug forms of β-L-FD4C and β-L-FddC.(WO 98/17281).

[0858] Additional NNRTIs include COACTINON™ (Emivirine/MKC-442, potent NNRTI of the HEPT class; Triangle/Abbott); CAPRAVIRINE™ (AG-1549/S-1153, a next generation NNRTI with activity against viruses containing the K103N mutation; Agouron); PNU-142721 (has 20- to 50-fold greater activity than its predecessor delavirdine and is active against K103N mutants; PRARMACIA™ & Upjohn); DPC-961 and DPC-963 (second-generation derivatives of efavirenz, designed to be active against viruses with the K103N mutation; DuPont); GW420867X (has 25-fold greater activity than HBY097 and is active against K103N mutants; Glaxo Wellcome); CALANOLIDIE A (naturally occurring agent from the latex tree; active against viruses containing either or both the Y181C and K103N mutations); and Propolis (WO 99/49830).

[0859] Additional protease inhibitors include LOPINAVIR™ (ABT378/r; Abbott Laboratories); BMS-232632 (an azapeptide; Bristol-Myres Squibb); TIPRANAVIR™ (PNU-140690, a non-peptic dihydropyrone; PHARMACIA™ & Upjohn); PD-178390 (a nonpeptidic dihydropyrone; Parke-Davis); BMS 232632 (an azapeptide; Bristol-Myers Squibb); L-756,423 (an indinavir analog; Merck); DMP450 (a cyclic urea compound; Avid & DuPont); AG-1776 (a peptidomimetic with in vitro activity against protease inhibitor-resistant viruses; Agouron); VX-175/GW433908 (phosphate prodrug of amprenavir; Vertex & Glaxo Welcome); CGP61755 (Ciba); and AGENERASE™ (amprenavir; Glaxo Wellcome Inc.).

[0860] Additional antiretroviral agents include fusion inhibitors/gp41 binders. Fusion inhibitors/gp41 binders include T-20 (a peptide from residues 643-678 of the HIV gp41 transmembrane protein ectodomain which binds to gp41 in its resting state and prevents transformation to the fusogenic state; Trimeris) and T-1249 (a second-generation fusion inhibitor; Trimeris).

[0861] Additional antiretroviral agents include fusion inhibitors/chemokine receptor antagonists. Fusion inhibitors/chemokine receptor antagonists include CXCR4 antagonists such as AMD 3100 (a bicyclam), SDF-1 and its analogs, and ALX404C (a cationic peptide), T22 (an 18 amino acid peptide; Trimeris) and the T22 analogs T134 and T140; CCR5 antagonists such as RANTES (9-68), AOP-RANTES, NNY-RANTES, and TAK-779; and CCR5/CXCR4 antagonists such as NSC 651016 (a distamycin analog). Also included are CCR2B, CCR3, and CCR6 antagonists. Chemokine reepetor agonists such as RANTES, SDF-1, MIP-1α, MIP-1β, etc., may also inhibit fusion.

[0862] Additional antiretroviral agents include integrase inhibitors. Integrase inhibitors include dicaffeoylquinic (DFQA) acids; L-chicoric acid (a dicaffeoyltartaric (DCTA) acid); quinalizarin (QLC) and related anthraquinones; ZINTEVIR™ (AR 177, an oligonucleotide that probably acts at cell surface rather than being a true integrase inhibitor; Arondex); and naphthols such as those disclosed in WO 98/50347.

[0863] Additional antiretroviral agents include hydroxyurea-like compunds such as BCX-34 (a purine nucleoside phosphorylase inhibitor; Biocryst); ribonucleotide reductase inhibitors such as DIDOX™ (Molecules for Health); inosine monophosphate dehydrogenase (IMPDH) inhibitors sucha as VX497 (Vertex); and mycopholic acids such as CellCept (mycophenolate mofetil; Roche).

[0864] Additional antiretroviral agents include inhibitors of viral integrase, inhibitors of viral genome nuclear translocation such as arylene bis(methylketone) compounds; inhibitors of HIV entry such as AOP-RANTES, NNY-RANTES, RANTES-IgG fusion protein, soluble complexes of RANTES and glycosaminoglycans (GAG), and AMD-3100; nucleocapsid zinc finger inhibitors such as dithiane compounds; targets of HIV Tat and Rev; and pharmacoenhancers such as ABT-378.

[0865] Other antiretroviral therapies and adjunct therapies include cytokines and lymphokines such as MIP-1α, MIP-1β, SDF-1α, IL-2, PROLEUKIN™ (aldesleukin/L2-7001; Chiron), L-4, IL-10, IL-12, and IL-13; interferons such as IFN-α2α; antagonists of TNFs, NFκB, GM-CSF, M-CSF, and IL-10; agents that modulate immune activation such as cyclosporin and prednisone; vaccines such as Remune™ (HIV Immunogen), APL 400-003 (Apollon), recombinant gp120 and fragments, bivalent (B/E) recombinant envelope glycoprotein, rgp120CM235, MN rgp120, SF-2 rgp120, gp120/soluble CD4 complex, Delta JR-FL protein, branched synthetic peptide derived from discontinuous gp120 C3/C4 domain, fusion-competent immunogens, and Gag, Pol, Nef, and Tat vaccines; gene-based therapies such as genetic suppressor elements (GSEs; WO 98/54366), and intrakines (genetically modified CC chemokines targetted to the ER to block surface expression of newly synthesized CCR5 (Yang et al., PNAS 94:11567-72 (1997); Chen et al., Nat. Med 3:1110-16 (1997)); antibodies such as the anti-CXCR4 antibody 12G5, the anti-CCR5 antibodies 2D7, 5C7, PA8, PA9, PA10, PA11, PA12, and PA14, the anti-CD4 antibodies Q4120 and RPA-T4, the anti-CCR3 antibody 7B11, the anti-gp120 antibodies 17b, 48d, 447-52D, 257-D, 268-D and 50.1, anti-Tat antibodies, anti-TNF-α antibodies, and monoclonal antibody 33A; aryl hydrocarbon (AH) receptor agonists and antagonists such as TCDD, 3,3′,4,4′,5-pentachlorobiphenyl, 3,3′,4,4′-tetrachlorobiphenyl, and α-naphthoflavone (WO 98/30213); and antioxidants such as γ-L-glutamyl-L-cysteine ethyl ester (γ-GCE; WO 99/56764).

[0866] In a further embodiment, the Therapeutics of the invention are administered in combination with an antiviral agent. Antiviral agents that may be administered with the Therapeutics of the invention include, but are not limited to, acyclovir, ribavirin, amantadine, and remantidine.

[0867] In other embodiments, Therapeutics of the invention may be administered in combination with anti-opportunistic infection agents. Anti-opportunistic agents that may be administered in combination with the Therapeutics of the invention, include, but are not limited to, TRIMETHOPRIM-SULFAMETHOXAZOLE™, DAPSONE™, PENTAMIDINE™, ATOVAQUONE™, ISONIAZID™, RIFAMPIN™, PYRAZINAMIDE™, ETHAMBUTOL™, RIFABUTIN™, CLARITHROMYCIN™, AZITHROMYCIN™, GANCICLOVIR™, FOSCARNET™, CIDOFOVIR™, FLUCONAZOLE™, ITRACONAZOLE™, KETOCONAZOLE™, ACYCLOVIR™, FAMCICOLVIR™, PYRINMETHAMINE™, LEUCOVORIN™, NEUPOGEN™ (filgrastim/G-CSF), and LEUKINE™ (sargramostim/GM-CSF). In a specific embodiment, Therapeutics of the invention are used in any combination with TRIMETHOPRIM-SULFAMETHOXAZOLE™, DAPSONE™, PENTAMIDINE™, and/or ATOVAQUONE™ to prophylactically treat or prevent an opportunistic Pneumocystis carinii pneumonia infection. In another specific embodiment, Therapeutics of the invention are used in any combination with ISONIAZID™, RIFAMPIN™, PYRAZINAMIDE™, and/or ETHAMBUTOL™ to prophylactically treat or prevent an opportunistic Mycobacterium avium complex infection. In another specific embodiment, Therapeutics of the invention are used in any combination with RIFABUTIN™, CLARITHROMYCIN™, and/or AZITHROMYCIN™ to prophylactically treat or prevent an opportunistic Mycobacterium tuberculosis infection. In another specific embodiment, Therapeutics of the invention are used in any combination with GANCICLOVIR™, FOSCARNET™, and/or CIDOFOVIR™ to prophylactically treat or prevent an opportunistic cytomegalovirus infection. In another specific embodiment, Therapeutics of the invention are used in any combination with FLUCONAZOLE™, ITRACONAZOLE™, and/or KETOCONAZOLE™ to prophylactically treat or prevent an opportunistic fungal infection. In another specific embodiment, Therapeutics of the invention are used in any combination with ACYCLOVIR™ and/or FAMCICOLVIR™ to prophylactically treat or prevent an opportunistic herpes simplex virus type I and/or type II infection. In another specific embodiment, Therapeutics of the invention are used in any combination with PYRIMETHAMINE™ and/or LEUCOVORIN™ to prophylactically treat or prevent an opportunistic Toxoplasma gondii infection. In another specific embodiment, Therapeutics of the invention are used in any combination with LEUCOVORIN™ and/or NEUPOGEN™ to prophylactically treat or prevent an opportunistic bacterial infection.

[0868] In a further embodiment, the Therapeutics of the invention are administered in combination with an antibiotic agent. Antibiotic agents that may be administered with the Therapeutics of the invention include, but are not limited to, amoxicillin, beta-lactamases, aminoglycosides, beta-lactam (glycopeptide), beta-lactamases, Clindamycin, chloramphenicol, cephalosporins, ciprofloxacin, erythromycin, fluoroquinolones, macrolides, metronidazole, penicillins, quinolones, rapamycin, rifampin, streptomycin, sulfonamide, tetracyclines, trimethoprim, trimethoprim-sulfamethoxazole, and vancomycin.

[0869] In other embodiments, the Therapeutics of the invention are administered in combination with immunestimulants. Immunostimulants that may be administered in combination with the Therapeutics of the invention include, but are not limited to, levamisole (e.g., ERGAMISOL™), isoprinosine (e.g. INOSIPLEX™), interferons (e.g. interferon alpha), and interleukins (e.g., IL-2).

[0870] In other embodiments, Therapeutics of the invention are administered in combination with immunosuppressive agents. Immunosuppressive agents that may be administered in combination with the Therapeutics of the invention include, but are not limited to, steroids, cyclosporine, cyclosporine analogs, cyclophosphamide methylprednisone, prednisone, azathioprine, FK-506, 15-deoxyspergualin, and other immunosuppressive agents that act by suppressing the function of responding T cells. Other immunosuppressive agents that may be administered in combination with the Therapeutics of the invention include, but are not limited to, prednisolone, methotrexate, thalidomide, methoxsalen, rapamycin, leflunomide, mizoribine (BREDININ™), brequinar, deoxyspergualin, and azaspirane (SKF 105685), ORTHOCLONE OKT® 3 (muromonab-CD3), SANDIMMUNE™, NEORAL™, SANGDYA™ (cyclosporine), PROGRAF® (FK506, tacrolimus), CELLCEPT® (mycophenolate motefil, of which the active metabolite is mycophenolic acid), IMURAN™ (azathioprine), glucocorticosteroids, adrenocortical steroids such as DELTASONE™ (prednisone) and HYDELTRASOL™ (prednisolone), FOLEX™ and MEXATE™ (methotrxate), OXSORALEN-ULTRA™ (methoxsalen) and RAPAMUNE™ (sirolimus). In a specific embodiment, immunosuppressants may be used to prevent rejection of organ or bone marrow transplantation.

[0871] In an additional embodiment, Therapeutics of the invention are administered alone or in combination with one or more intravenous immune globulin preparations. Intravenous immune globulin preparations that may be administered with the Therapeutics of the invention include, but not limited to, GAMMAR™, IVEEGAM™, SANDOGLOBULIN™, GAMMAGARD S/D™, ATGAM™ (antithymocyte glubulin), and GAMIMUNE™. In a specific embodiment, Therapeutics of the invention are administered in combination with intravenous immune globulin preparations in transplantation therapy (e.g., bone marrow transplant).

[0872] In certain embodiments, the Therapeutics of the invention are administered alone or in combination with an anti-inflammatory agent. Anti-inflammatory agents that may be administered with the Therapeutics of the invention include, but are not limited to, corticosteroids (e.g. betamethasone, budesonide, cortisone, dexamethasone, hydrocortisone, methylprednisolone, prednisolone, prednisone, and triamcinolone), nonsteroidal anti-inflammatory drugs (e.g., diclofenac, diflunisal, etodolac, fenoprofen, floctafenine, flurbiprofen, ibuprofen, indomethacin, ketoprofen, meclofenamate, mefenamic acid, meloxicam, nabumetone, naproxen, oxaprozin, phenylbutazone, piroxicam, sulindac, tenoxicam, tiaprofenic acid, and tolmetin.), as well as antihistamines, aminoarylcarboxylic acid derivatives, arylacetic acid derivatives, arylbutyric acid derivatives, arylcarboxylic acids, arylpropionic acid derivatives, pyrazoles, pyrazolones, salicylic acid derivatives, thiazinecarboxamides, e-acetamidocaproic acid, S-adenosylmethionine, 3-amino-4-hydroxybutyric acid, amixetrine, bendazac, benzydamine, bucolome, difenpiramide, ditazol, emorfazone, guaiazulene, nabumetone, nimesulide, orgotein, oxaceprol, paranyline, perisoxal, pifoxime, proquazone, proxazole, and tenidap.

[0873] In an additional embodiment, the compositions of the invention are administered alone or in combination with an anti-angiogenic agent. Anti-angiogenic agents that may be administered with the compositions of the invention include, but are not limited to, Angiostatin (Entremed, Rockville, Md.), Troponin-1 (Boston Life Sciences, Boston, Mass.), anti-Invasive Factor, retinoic acid and derivatives thereof, paclitaxel (Taxol), Suranin, Tissue Inhibitor of Metalloproteinase-1, Tissue Inhibitor of Metalloproteinase-2, VEGI, Plasminogen Activator Inhibitor-1, Plasminogen Activator Inhibitor-2, and various forms of the lighter “d group” transition metals.

[0874] Lighter “d group” transition metals include, for example, vanadium, molybdenum, tungsten, titanium, niobium, and tantalum species. Such transition metal species may form transition metal complexes. Suitable complexes of the above-mentioned transition metal species include oxo transition metal complexes.

[0875] Representative examples of vanadium complexes include oxo vanadium complexes such as vanadate and vanadyl complexes. Suitable vanadate complexes include metavanadate and orthovanadate complexes such as, for example, ammonium metavanadate, sodium metavanadate, and sodium orthovanadate. Suitable vanadyl complexes include, for example, vanadyl acetylacetonate and vanadyl sulfate including vanadyl sulfate hydrates such as vanadyl sulfate mono- and trihydrates.

[0876] Representative examples of tungsten and molybdenum complexes also include oxo complexes. Suitable oxo tungsten complexes include tungstate and tungsten oxide complexes. Suitable tungstate complexes include ammonium tungstate, calcium tungstate, sodium tungstate dihydrate, and tungstic acid. Suitable tungsten oxides include tungsten (IV) oxide and tungsten (VI) oxide. Suitable oxo molybdenum complexes include molybdate, molybdenum oxide, and molybdenyl complexes. Suitable molybdate complexes include ammonium molybdate and its hydrates, sodium molybdate and its hydrates, and potassium molybdate and its hydrates. Suitable molybdenum oxides include molybdenum (VI) oxide, molybdenum (VI) oxide, and molybdic acid. Suitable molybdenyl complexes include, for example, molybdenyl acetylacetonate. Other suitable tungsten and molybdenum complexes include hydroxo derivatives derived from, for example, glycerol, tartaric acid, and sugars.

[0877] A wide variety of other anti-angiogenic factors may also be utilized within the context of the present invention. Representative examples include, but are not limited to, platelet factor 4; protamine sulphate; sulphated chitin derivatives (prepared from queen crab shells), (Murata et al., Cancer Res. 51:22-26, (1991)); Sulphated Polysaccharide Peptidoglycan Complex (SP-PG) (the function of this compound may be enhanced by the presence of steroids such as estrogen, and tamoxifen citrate); Staurosporine; modulators of matrix metabolism, including for example, proline analogs, cishydroxyproline, d,L-3,4-dehydroproline, Thiaproline, alpha,alpha-dipyridyl, aminopropionitrile fumarate; 4-propyl-5-(4-pyridinyl)-2(3H)-oxazolone; Methotrexate; Mitoxantrone; Heparin; Interferons; 2 Macroglobulin-serum; ChIMP-3 (Pavloff et al., J. Bio. Chem. 267:17321-17326, (1992)); Chymostatin (Tomkinson et al., Biochem J. 286:475-480, (1992)); Cyclodextrin Tetradecasulfate; Eponemycin; Camptothecin; Fumagillin (Ingber et al., Nature 348:555-557, (1990)); Gold Sodium Thiomalate (“GST”; Matsubara and Ziff, J. Clin. Invest. 79:1440-1446, (1987)); anticollagenase-serum; alpha2-antiplasmin (Holmes et al., J. Biol. Chem. 262(4):1659-1664, (1987)); Bisantrene (National Cancer Institute); Lobenzarit disodium (N-(2)-carboxyphenyl-4-chloroanthronilic acid disodium or “CCA”; (Takeuchi et al., Agents Actions 36:312-316, (1992)); and metalloproteinase inhibitors such as BB94.

[0878] Additional anti-angiogenic factors that may also be utilized within the context of the present invention include Thalidomide, (Celgene, Warren, N.J.); Angiostatic steroid; AGM-1470 (H. Brem and J. Folkman J Pediatr. Surg. 28:445-51 (1993)); an integrin alpha v beta 3 antagonist (C. Storgard et al., J. Clin. Invest. 103:47-54 (1999)); carboxynaminolmidazole; Carboxyamidotriazole (CAI) (National Cancer Institute, Bethesda, Md.); Conbretastatin A-4 (CA4P) (OXiGENE, Boston, Mass.); Squalamine (Magainin Pharmaceuticals, Plymouth Meeting, Pa.); TNP-470, (Tap Pharmaceuticals, Deerfield, Ill.); ZD-0101 AstraZeneca (London, UK); APRA (CT2584); Benefin, Byrostatin-1 (SC339555); CGP-41251 (PKC 412); CM101; Dexrazoxane (ICRF187); DMXAA; Endostatin; Flavopridiol; Genestein; GTE; ImmTher; Iressa (ZD1839); Octreotide (Somatostatin); Panretin; Penacillamine; Photopoint; PI-88; Prinomastat (AG-3340) Purlytin; Suradista (FCE26644); Tamoxifen (Nolvadex); Tazarotene; Tetrathiomolybdate; Xeloda (Capecitabine); and 5-Fluorouracil.

[0879] Anti-angiogenic agents that may be administed in combination with the compounds of the invention may work through a variety of mechanisms including, but not limited to, inhibiting proteolysis of the extracellular matrix, blocking the function of endothelial cell-extracellular matrix adhesion molecules, by antagonizing the function of angiogenesis inducers such as growth factors, and inhibiting integrin receptors expressed on proliferating endothelial cells. Examples of anti-angiogenic inhibitors that interfere with extracellular matrix proteolysis and which may be administered in combination with the compositons of the invention include, but are not lmited to, AG-3340 (Agouron, La Jolla, Calif.), BAY-12-9566 (Bayer, West Haven, Conn.), BMS-275291 (Bristol Myers Squibb, Princeton, N.J.), CGS-27032A (Novartis, East Hanover, N.J.), Marimastat (British Biotech, Oxford, UK), and Metastat (Aeterna, St-Foy, Quebec). Examples of anti-angiogenic inhibitors that act by blocking the function of endothelial cell-extracellular matrix adhesion molecules and which may be administered in combination with the compositons of the invention include, but are not lmited to, EMD-121974 (Merck KcgaA Darmstadt, Germany) and Vitaxin (Ixsys, La Jolla, Calif./Medimmune, Gaithersburg, Md.). Examples of anti-angiogenic agents that act by directly antagonizing or inhibiting angiogenesis inducers and which may be administered in combination with the compositons of the invention include, but are not lmited to, Angiozyme (Ribozyme, Boulder, Colo.), Anti-VEGF antibody (Genentech, S. San Francisco, Calif.), PTK-787/ZK-225846 (Novartis, Basel, Switzerland), SU-101 (Sugen, S. San Francisco, Calif.), SU-5416 (Sugen/PHARMACIA™ Upjohn, Bridgewater, N.J.), and SU-6668 (Sugen). Other anti-angiogenic agents act to indirectly inhibit angiogenesis. Examples of indirect inhibitors of angiogenesis which may be administered in combination with the compositons of the invention include, but are not limited to, IM-862 (Cytran, Kirkland, Wash.), Interferon-alpha, IL-12 (Roche, Nutley, N.J.), and Pentosan polysulfate (Georgetown University, Washington, D.C.).

[0880] In particular embodiments, the use of compositions of the invention in combination with anti-angiogenic agents is contemplated for the treatment, prevention, and/or amelioration of an autoimmune disease, such as for example, an autoimmune disease described herein.

[0881] In a particular embodiment, the use of compositions of the invention in combination with anti-angiogenic agents is contemplated for the treatment, prevention, and/or amelioration of arthritis. In a more particular embodiment, the use of compositions of the invention in combination with anti-angiogenic agents is contemplated for the treatment, prevention, and/or amelioration of rheumatoid arthritis.

[0882] In another embodiment, the polynucleotides encoding a polypeptide of the present invention are administered in combination with an angiogenic protein, or polynucleotides encoding an angiogenic protein. Examples of angiogenic proteins that may be administered with the compositions of the invention include, but are not limited to, acidic and basic fibroblast growth factors, VEGF-1, VEGF-2, VEGF-3, epidermal growth factor alpha and beta, platelet-derived endothelial cell growth factor, platelet-derived growth factor, tumor necrosis factor alpha, hepatocyte growth factor, insulin-like growth factor, colony stimulating factor, macrophage colony stimulating factor, granulocyte/macrophage colony stimulating factor, and nitric oxide synthase.

[0883] In additional embodiments, compositions of the invention are administered in combination with a chemotherapeutic agent. Chemotherapeutic agents that may be administered with the Therapeutics of the invention include, but are not limited to alkylating agents such as nitrogen mustards (for example, Mechlorethamine, cyclophosphamide, Cyclophosphamide Ifosfamide, Melphalan (L-sarcolysin), and Chlorambucil), ethylenimines and methylmelamines (for example, Hexamethylmelamine and Thiotepa), alkyl sulfonates (for example, Busulfan), nitrosoureas (for example, Carmustine (BCNU), Lomustine (CCNU), Semustine (methyl-CCNU), and Streptozocin (streptozotocin)), triazenes (for example, Dacarbazine (DTIC; dimethyltriazenoimidazolecarboxamide)), folic acid analogs (for example, Methotrexate (amethopterin)), pyrimidine analogs (for example, Fluorouacil (5-fluorouracil; 5-FU), Floxuridine (fluorodeoxyuridine; FudR), and Cytarabine (cytosine arabinoside)), purine analogs and related inhibitors (for example, Mercaptopurine (6-mercaptopurine; 6-MP), Thioguanine (6-thioguanine; TG), and Pentostatin (2′-deoxycoformycin)), vinca alkaloids (for example, Vinblastine (VLB, vinblastine sulfate)) and Vincristine (vincristine sulfate)), epipodophyllotoxins (for example, Etoposide and Teniposide), antibiotics (for example, Dactinomycin (actinomycin D), Daunorubicin (daunomycin; rubidomycin), Doxorubicin, Bleomycin, Plicamycin (mithramycin), and Mitomycin (mitomycin C), enzymes (for example, L-Asparaginase), biological response modifiers (for example, Interferon-alpha and interferon-alpha-2b), platinum coordination compounds (for example, Cisplatin (cis-DDP) and Carboplatin), anthracenedione (Mitoxantrone), substituted ureas (for example, Hydroxyurea), methylhydrazine derivatives (for example, Procarbazine (N-methylhydrazine; MIH), adrenocorticosteroids (for example, Prednisone), progestins (for example, Hydroxyprogesterone caproate, Medroxyprogesterone, Medroxyprogesterone acetate, and Megestrol acetate), estrogens (for example, Diethylstilbestrol (DES), Diethylstilbestrol diphosphate, Estradiol, and Ethinyl estradiol), antiestrogens (for example, Tamoxifen), androgens (Testosterone proprionate, and Fluoxymesterone), antiandrogens (for example, Flutamide), gonadotropin-releasing horomone analogs (for example, Leuprolide), other hormones and hormone analogs (for example, methyltestosterone, estramustine, estramustine phosphate sodium, chlorotrianisene, and testolactone), and others (for example, dicarbazine, glutamic acid, and mitotane).

[0884] In one embodiment, the compositions of the invention are administered in combination with one or more of the following drugs: infliximab (also known as Remicade™ Centocor, Inc.), Trocade (Roche, RO-32-3555), Leflunomide (also known as Arava™ from Hoechst Marion Roussel), Kineret™ (an IL-1 Receptor antagonist also known as Anakinra from Amgen, Inc.)

[0885] In a specific embodiment, compositions of the invention are administered in combination with CHOP (cyclophosphamide, doxorubicin, vincristine, and prednisone) or combination of one or more of the components of CHOP. In one embodiment, the compositions of the invention are administered in combination with anti-CD20 antibodies, human monoclonal anti-CD20 antibodies. In another embodiment, the compositions of the invention are administered in combination with anti-CD20 antibodies and CHOP, or anti-CD20 antibodies and any combination of one or more of the components of CHOP, particularly cyclophosphamide and/or prednisone. In a specific embodiment, compositions of the invention are administered in combination with Rituximab. In a further embodiment, compositions of the invention are administered with Rituximab and CHOP, or Rituximab and any combination of one or more of the components of CHOP, particularly cyclophosphamide and/or prednisone. In a specific embodiment, compositions of the invention are administered in combination with tositumomab. In a further embodiment, compositions of the invention are administered with tositumomab and CHOP, or tositumomab and any combination of one or more of the components of CHOP, particularly cyclophosphamide and/or prednisone. The anti-CD20 antibodies may optionally be associated with radioisotopes, toxins or cytotoxic prodrugs.

[0886] In another specific embodiment, the compositions of the invention are administered in combination Zevalin™. In a further embodiment, compositions of the invention are administered with Zevalin™ and CHOP, or Zevalin™ and any combination of one or more of the components of CHOP, particularly cyclophosphamide and/or prednisone. Zevalin™ may be associated with one or more radisotopes. Particularly preferred isotopes are ⁹⁰Y and ¹¹¹In.

[0887] In an additional embodiment, the Therapeutics of the invention are administered in combination with cytokines. Cytokines that may be administered with the Therapeutics of the invention include, but are not limited to, IL2, IL3, IL4, IL5, IL6, IL7, IL10, IL12, IL13, IL15, anti-CD40, CD40L, IFN-gamma and TNF-alpha. In another embodiment, Therapeutics of the invention may be administered with any interleukin, including, but not limited to, IL-1alpha, IL-1beta, IL-2, IL-3, L-4, IL-5, IL-6, IL-7, IL-8, IL-9, IL-10, IL-11, IL-12, IL-13, IL-14, IL-15, IL-16, IL-17, IL-18, IL-19, IL-20, and IL-21.

[0888] In one embodiment, the Therapeutics of the invention are administered in combination with members of the TNF family. TNF, TNF-related or TNF-like molecules that may be administered with the Therapeutics of the invention include, but are not limited to, soluble forms of TNF-alpha, lymphotoxin-alpha (LT-alpha, also known as TNF-beta), LT-beta (found in complex heterotrimer LT-alpha2-beta), OPGL, FasL, CD27L, CD30L, CD40L, 4-1BBL, DcR3, OX40L, TNF-gamma (International Publication No. WO 96/14328), AIM-1 (International Publication No. WO 97/33899), endokine-alpha (International Publication No. WO 98/07880), OPG, and neutrokine-alpha (International Publication No. WO 98/18921, OX40, and nerve growth factor (NGF), and soluble forms of Fas, CD30, CD27, CD40 and 4-IBB, TR2 (International Publication No. WO 96/34095), DR3 (International Publication No. WO 97/33904), DR4 (International Publication No. WO 98/32856), TR5 (International Publication No. WO 98/30693), TRANK, TR9 (International Publication No. WO 98/56892),TR10 (International Publication No. WO 98/54202), 312C2 (International Publication No. WO 98/06842), and TR12, and soluble forms CD154, CD70, and CD153.

[0889] In an additional embodiment, the Therapeutics of the invention are administered in combination with angiogenic proteins. Angiogenic proteins that may be administered with the Therapeutics of the invention include, but are not limited to, Glioma Derived Growth Factor (GDGF), as disclosed in European Patent Number EP-399816; Platelet Derived Growth Factor-A (PDGF-A), as disclosed in European Patent Number EP-682110; Platelet Derived Growth Factor-B (PDGF-B), as disclosed in European Patent Number EP-282317; Placental Growth Factor (PIGF), as disclosed in International Publication Number WO 92/06194; Placental Growth Factor-2 (PIGF-2), as disclosed in Hauser et al., Growth Factors, 4:259-268 (1993); Vascular Endothelial Growth Factor (VEGF), as disclosed in International Publication Number WO 90/13649; Vascular Endothelial Growth Factor-A (VEGF-A), as disclosed in European Patent Number EP-506477; Vascular Endothelial Growth Factor-2 (VEGF-2), as disclosed in International Publication Number WO 96/39515; Vascular Endothelial Growth Factor B (VEGF-3); Vascular Endothelial Growth Factor B-186 (VEGF-B186), as disclosed in International Publication Number WO 96/26736; Vascular Endothelial Growth Factor-D (VEGF-D), as disclosed in International Publication Number WO 98/02543; Vascular Endothelial Growth Factor-D (VEGF-D), as disclosed in International Publication Number WO 98/07832; and Vascular Endothelial Growth Factor-E (VEGF-E), as disclosed in German Patent Number DE19639601. The above mentioned references are herein incorporated by reference in their entireties.

[0890] In an additional embodiment, the Therapeutics of the invention are administered in combination with Fibroblast Growth Factors. Fibroblast Growth Factors that may be administered with the Therapeutics of the invention include, but are not limited to, FGF-1, FGF-2, FGF-3, FGF-4, FGF-5, FGF-6, FGF-7, FGF-8, FGF-9, FGF-10, FGF-11, FGF-12, FGF-13, FGF-14, and FGF-15.

[0891] In an additional embodiment, the Therapeutics of the invention are administered in combination with hematopoietic growth factors. Hematopoietic growth factors that may be administered with the Therapeutics of the invention include, but are not limited to, granulocyte macrophage colony stimulating factor (GM-CSF) (sargramostim, LEUKINE™, PROKINE™), granulocyte colony stimulating factor (G-CSF) (filgrastim, NEUPOGEN™), macrophage colony stimulating factor (M-CSF, CSF-1) erythropoietin (epoetin alfa, EPOGEN™, PROCRIT™), stem cell factor (SCF, c-kit ligand, steel factor), megakaryocyte colony stimulating factor, PIXY321 (a GMCSF/IL-3 fusion protein), interleukins, especially any one or more of IL-1 through IL-12, interferon-gamma, or thrombopoietin.

[0892] In certain embodiments, Therapeutics of the present invention are administered in combination with adrenergic blockers, such as, for example, acebutolol, atenolol, betaxolol, bisoprolol, carteolol, labetalol, metoprolol, nadolol, oxprenolol, penbutolol, pindolol, propranolol, sotalol, and timolol.

[0893] In another embodiment, the Therapeutics of the invention are administered in combination with an antiarrhythmic drug (e.g., adenosine, amidoarone, bretylium, digitalis, digoxin, digitoxin, diliazem, disopyramide, esmolol, flecainide, lidocaine, mexiletine, moricizine, phenyloin, procainamide, N-acetyl procainamide, propafenone, propranolol, quinidine, sotalol, tocainide, and verapamil).

[0894] In another embodiment, the Therapeutics of the invention are administered in combination with diuretic agents, such as carbonic anhydrase-inhibiting agents (e.g., acetazolamide, dichlorphenamide, and methazolamide), osmotic diuretics (e.g., glycerin, isosorbide, mannitol, and urea), diuretics that inhibit Na⁺—K⁺-2Cl⁻ symport (e.g., furosemide, bumetamide, azosemide, piretanide, tripamide, ethacrynic acid, muzolimine, and torsemide), thiazide and thiazide-like diuretics (e.g., bendroflumethiazide, benzthiazide, chlorothiazide, hydrochlorothiazide, hydroflumethiazide, methyclothiazide, polythiazide, trichomnethiazide, chlorthalidone, indapamide, metolazone, and quinethazone), potassium sparing diuretics (e.g., amiloride and triamterene), and mineralcorticoid receptor antagonists (e.g., spironolactone, canrenone, and potassium canrenoate).

[0895] In one embodiment, the Therapeutics of the invention are administered in combination with treatments for endocrine and/or hormone imbalance disorders. Treatments for endocrine and/or hormone imbalance disorders include, but are not limited to, ¹²⁷I, radioactive isotopes of iodine such as ¹³¹I and ¹²³I; recombinant growth hormone, such as HUMATROPE™ (recombinant somatropin); growth hormone analogs such as PROTROPIN™ (somatrem); dopamine agonists such as PARLODEL™ (bromocriptine); somatostatin analogs such as SANDOSTATIN™ (octreotide); gonadotropin preparations such as PREGNYL™, A.P.L.™ and PROFASI™ (chorionic gonadotropin (CG)), PERGONAL™ (menotropins), and METRODIN™ (urofollitropin (uFSH)); synthetic human gonadotropin releasing hormone preparations such as FACTREL™ and LUTREPULSE™ (gonadorelin hydrochloride); synthetic gonadotropin agonists such as LUPRON™ (leuprolide acetate), SUPPRELIN™ (histrelin acetate), SYNAREL™ (nafarelin acetate), and ZOLADEX™ (goserelin acetate); synthetic preparations of thyrotropin-releasing hormone such as RELEFACT TRH™ and THYPINONE™ (protirelin); recombinant human TSH such as THYROGEN™; synthetic preparations of the sodium salts of the natural isomers of thyroid hormones such as L-T₄™, SYNTHROID™ and LEVOTHROID™ (levothyroxine sodium), L-T₃™, CYTOMEL™ and TRIOSTAT™ (liothyroine sodium), and THYROLAR™ (liotrix); antithyroid compounds such as 6-n-propylthiouracil (propylthiouracil), 1-methyl-2-mercaptoimidazole and TAPAZOLE™ (methimazole), NEO-MERCAZOLE™ (carbimazole); beta-adrenergic receptor antagonists such as propranolol and esmolol; Ca²⁺ channel blockers; dexamethasone and iodinated radiological contrast agents such as TELEPAQUE™ (iopanoic acid) and ORAGRAFIN™ (sodium ipodate).

[0896] Additional treatments for endocrine and/or hormone imbalance disorders include, but are not limited to, estrogens or congugated estrogens such as ESTRACE™ (estradiol), ESTINYL™ (ethinyl estradiol), PREMARIN™, ESTRATAB™, ORTHO-EST™, OGEN™ and estropipate (estrone), ESTROVIS™ (quinestrol), ESTRADERM™ (estradiol), DELESTROGEN™ and VALERGEN™ (estradiol valerate), DEPO-ESTRADIOL CYPIONATE™ and ESTROJECT LA™ (estradiol cypionate); antiestrogens such as NOLVADEX™ (tamoxifen), SEROPHENE™ and CLOMID™ (clomiphene); progestins such as DURALUTIN™ (hydroxyprogesterone caproate), MPA™ and DEPO-PROVERA™ (medroxyprogesterone acetate), PROVERA™ and CYCRIN™ (MPA), MEGACE™ (megestrol acetate), NORLUTIN™ (norethindrone), and NORLUTATE™ and AYGESTIN™ (norethindrone acetate); progesterone implants such as NORPLANT SYSTEM™ (subdermal implants of norgestrel); antiprogestins such as RU 486™ (mifepristone); hormonal contraceptives such as ENOVID™ (norethynodrel plus mestranol), PROGESTASERT™ (intrauterine device that releases progesterone), LOESTRIN™, BREVICON™, MODICON™, GENORA™, NELONA™, NORINYL™, OVACON-35™ and OVACON-50™ (ethinyl estradiol/norethindrone), LEVLEN™, NORDETTE™, TRI-LEVLEN™ and TRIPHASIL-21™ (ethinyl estradiol/levonorgestrel) LO/OVRAL™ and OVRAL™ (ethinyl estradiolnorgestrel), DEMULEN™ (ethinyl estradiol/ethynodiol diacetate), NORINYL™, ORTHO-NOVUM™, NORETHIN™, GENORA™, and NELOVA™ (norethindrone/mestranol), DESOGEN™ and ORTHO-CEPT™ (ethinyl estradiol/desogestrel), ORTHO-CYCLEN™ and ORTHO-TRICYCLEN™ (ethinyl estradiol/norgestimate), MICRONOR™ and NOR-QD™ (norethindrone), and OVRETTE™ (norgestrel).

[0897] Additional treatments for endocrine and/or hormone imbalance disorders include, but are not limited to, testosterone esters such as methenolone acetate and testosterone undecanoate; parenteral and oral androgens such as TESTOJECT-50™ (testosterone), TESTEX™, (testosterone propionate), DELATESTRYL™ (testosterone enanthate), DEPO-TESTOSTERONE™ (testosterone cypionate), DANOCRINE™ (danazol), HALOTESTIN™ (fluoxymesterone), ORETON METHYL™, TESTRED™ and VIRILON™ (methyltestosterone), and OXANDRIN™ (oxandrolone); testosterone transdermal systems such as TESTODERM™; androgen receptor antagonist and 5-alpha-reductase inhibitors such as ANDROCUR™ (cyproterone acetate), EULEXIN™ (flutamide), and PROSCAR™ (finasteride); adrenocorticotropic hormone preparations such as CORTROSYN™ (cosyntropin); adrenocortical steroids and their synthetic analogs such as ACLOVATE™ (alclometasone dipropionate), CYCLOCORT™ (amcinonide), BECLOVENT™ and VANCERIL™ (beclomethasone dipropionate), CELESTONE™ (betamethasone), BENISONE™ and UTICORT™ (betamethasone benzoate), DIPROSONE™ (betamethasone dipropionate), CELESTONE PHOSPHATE™ (betamethasone sodium phosphate), CELESTONE SOLUSPAN™ (betamethasone sodium phosphate and acetate), BETA-VAL™ and VALISONE™ (betamethasone valerate), TEMOVATE™ (clobetasol propionate), CLODERM™ (clocortolone pivalate), CORTEF™ and HYDROCORTONE™ (cortisol (hydrocortisone)), HYDROCORTONE ACETATE™ (cortisol (hydrocortisone) acetate), LOCOID™ (cortisol (hydrocortisone) butyrate), HYDROCORTONE PHOSPHATE™ (cortisol (hydrocortisone) sodium phosphate), A-HYDROCORT™ and SOLU CORTEF™ (cortisol (hydrocortisone) sodium succinate), WESTCORT™ (cortisol (hydrocortisone) valerate), CORTISONE ACETATE™ (cortisone acetate), DESOWEN™ and TRIDESILON™ (desonide), TOPICORT™ (desoximetasone), DECADRON™ (dexamethasone), DECADRON LA™ (dexamethasone acetate), DECADRON PHOSPHATE™ and HEXADROL PHOSPHATE™ (dexamethasone sodium phosphate), FLORONE™ and MAXIFLOR™ (diflorasone diacetate), FLORINEF ACETATE™ (fludrocortisone acetate), AEROBID™ and NASALIDE™ (flunisolide), FLUONID™ and SYNALAR™ (fluocinolone acetonide), LIDEX™ (fluocinonide), FLUOR-OP™ and FML™ (fluorometholone), CORDRAN™ (flurandrenolide), HALOG™ (halcinonide), HMS LIZUIFILM™ (medrysone), MEDROL™ (methylprednisolone), DEPO-MEDROL™ and MEDROL ACETATE™ (methylprednisone acetate), A-METHAPRED™ and SOLUMEDROL™ (methylprednisolone sodium succinate), ELOCON™ (mometasone furoate), HALDRONE™ (paramethasone acetate), DELTA-CORTEF™ (prednisolone), ECONOPRED™ (prednisolone acetate), HYDELTRASOL™ (prednisolone sodium phosphate), HYDELTRA-T.B.A™ (prednisolone tebutate), DELTASONE™ (prednisone), ARISTOCORT™ and KENACORT™ (triamcinolone), KENALOG™ (triamcinolone acetonide), ARISTOCORT™ and KENACORT DIACETATE™ (triamcinolone diacetate), and ARISTOSPAN™ (triamcinolone hexacetonide); inhibitors of biosynthesis and action of adrenocortical steroids such as CYTADREN™ (aminoglutethimide), NIZORAL™ (ketoconazole), MODRASTANE™ (trilostane), and METOPIRONE™ (metyrapone); bovine, porcine or human insulin or mixtures thereof; insulin analogs; recombinant human insulin such as HUMULIN™ and NOVOLIN™; oral hypoglycemic agents such as ORAMIDE™ and ORINASE™ (tolbutamide), DIABINESE™ (chlorpropamide), TOLAMIDE™ and TOLINASE™ (tolazamide), DYMELOR™ (acetohexamide), glibenclamide, MICRONASE™, DIBETA™ and GLYNASE™ (glyburide), GLUCOTROL™ (glipizide), and DIAMICRON™ (gliclazide), GLUCOPHAGE™ (metformin), ciglitazone, pioglitazone, and alpha-glucosidase inhibitors; bovine or porcine glucagon; somatostatins such as SANDOSTATIN™ (octreotide); and diazoxides such as PROGLYCEM™ (diazoxide).

[0898] In an additional embodiment, the Therapeutics of the invention are administered in combination with drugs effective in treating iron deficiency and hypochromic anemias, including but not limited to, ferrous sulfate (iron sulfate, FEOSOL™), ferrous fumarate (e.g., FEOSTAT™), ferrous gluconate (e.g., FERGON™), polysaccharide-iron complex (e.g., NIFEREX™), iron dextran injection (e.g., INFED™), cupric sulfate, pyroxidine, riboflavin, Vitamin B₁₂, cyancobalamin injection (e.g., REDISOL™, RUBRAMIN PC™), hydroxocobalamin, folic acid (e.g., FOLVITE™), leucovorin (folinic acid, 5-CHOH4PteGlu, citrovorum factor) or WELLCOVORIN (Calcium salt of leucovorin), transferrin or ferritin.

[0899] In another embodiment, Therapeutics of the invention are administered in combination with vasodilating agents and/or calcium channel blocking agents. Vasodilating agents that may be administered with the Therapeutics of the invention include, but are not limited to, Angiotensin Converting Enzyme (ACE) inhibitors (e.g., papaverine, isoxsuprine, benazepril, captopnil, cilazapril, enalapril, enalaprilat, fosinopril, lisinopril, moexipril, perindopril, quinapril, ramipril, spirapril, trandolapril, and nylidrin), and nitrates (e.g., isosorbide dinitrate, isosorbide mononitrate, and nitroglycerin). Examples of calcium channel blocking agents that may be administered in combination with the Therapeutics of the invention include, but are not limited to amlodipine, bepridil, diltiazem, felodipine, flunarizine, isradipine, nicardipine, nifedipine, nimodipine, and verapamil.

[0900] In certain embodiments, the Therapeutics of the invention are administered in combination with treatments for gastrointestinal disorders. Treatments for gastrointestinal disorders that may be administered with the Therapeutic of the invention include, but are not limited to, H₂ histamine receptor antagonists (e.g., TAGAMET™ (cimetidine), ZANTAC™ (ranitidine), PEPCID™ (famotidine), and AXID™ (nizatidine)); inhibitors of H⁺, K⁺ ATPase (e.g., PREVACID™ (lansoprazole) and PRILOSEC™ (omeprazole)); Bismuth compounds (e.g., PEPTO-BISMOL™ (bismuth subsalicylate) and DE-NOL™ (bismuth subcitrate)); various antacids; sucralfate; prostaglandin analogs (e.g. CYTOTEC™ (misoprostol)); muscarinic cholinergic antagonists; laxatives (e.g., surfactant laxatives, stimulant laxatives, saline and osmotic laxatives); antidiarrheal agents (e.g., LOMOTIL™ (diphenoxylate), MOTOFEN™ (diphenoxin), and IMODIUM™ (loperamide hydrochloride)), synthetic analogs of somatostatin such as SANDOSTATIN™ (octreotide), antiemetic agents (e.g., ZOFRAN™ (ondansetron), KYTRIL™ (granisetron hydrochloride), tropisetron, dolasetron, metoclopramide, chlorpromazine, perphenazine, prochlorperazine, promethazine, thiethylperazine, triflupromazine, domperidone, haloperidol, droperidol, trimethobenzamide, dexamethasone, methylprednisolone, dronabinol, and nabilone); D2 antagonists (e.g., metoclopramide, trimethobenzamide and chlorpromazine); bile salts; chenodeoxycholic acid; ursodeoxycholic acid; and pancreatic enzyme preparations such as pancreatin and pancrelipase.

[0901] In additional embodiments, the Therapeutics of the invention are administered in combination with other therapeutic or prophylactic regimens, such as, for example, radiation therapy.

### Example 14

### Method of Treating Decreased Levels of the Polypeptide

[0902] The present invention relates to a method for treating an individual in need of an increased level of a polypeptide of the invention in the body comprising administering to such an individual a composition comprising a therapeutically effective amount of polypeptides (including agonists thereto), and/or antibodies of the invention. Moreover, it will be appreciated that conditions caused by a decrease in the standard or normal expression level of a polypeptide of the present invention in an individual may be treated by administering agonists of said polypeptide. Thus, the invention also provides a method of treatment of an individual in need of an increased level of the polypeptide comprising administering to such an individual a Therapeutic comprising an amount of the agonist (including polypeptides and antibodies of the present invention) to increase the activity level of the polypeptide in such an individual.

[0903] For example, a patient with decreased levels of a polypeptide receives a daily dose 0.1-100 μg/kg of the agonist for six consecutive days. The exact details of the dosing scheme, based on administration and formulation, are provided in Example 13.

### Example 15

### Method of Treating Increased Levels of the Polypeptide

[0904] The present invention also relates to a method of treating an individual in need of a decreased level of a polypeptide of the invention in the body comprising administering to such an individual a composition comprising a therapeutically effective amount of an antagonist of the invention (including polypeptides and antibodies of the invention).

[0905] In one example, antisense technology is used to inhibit production of a polypeptide of the present invention. This technology is one example of a method of decreasing levels of a polypeptide, due to a variety of etiologies, such as cancer.

[0906] For example, a patient diagnosed with abnormally increased levels of a polypeptide is administered intravenously antisense polynucleotides at 0.5, 1.0, 1.5, 2.0 and 3.0 mg/kg day for 21 days. This treatment is repeated after a 7-day rest period if the treatment was well tolerated. The antisense polynucleotides of the present invention can be formulated using techniques and formulations described herein (e.g. see Example 13), or otherwise known in the art.

### Example 16

### Method of Treatment Using Gene Therapy—Ex Vivo

[0907] One method of gene therapy transplants fibroblasts, which are capable of expressing a polypeptide, onto a patient. Generally, fibroblasts are obtained from a subject by skin biopsy. The resulting tissue is placed in tissue-culture medium and separated into small pieces. Small chunks of the tissue are placed on a wet surface of a tissue culture flask, approximately ten pieces are placed in each flask. The flask is turned upside down, closed tight and left at room temperature over night After 24 hours at room temperature, the flask is inverted and the chunks of tissue remain fixed to the bottom of the flask and fresh media (e.g., Ham's F12 media, with 10% FBS, penicillin and streptomycin) is added. The flasks are then incubated at 37 degree C. for approximately one week.

[0908] At this time, fresh media is added and subsequently changed every several days. After an additional two weeks in culture, a monolayer of fibroblasts emerge. The monolayer is trypsinized and scaled into larger flasks.

[0909] pMV-7 (Kirschmeier, P. T. et al., DNA, 7:219-25 (1988)), flanked by the long terminal repeats of the Moloney murine sarcoma virus, is digested with EcoRI and HindIII and subsequently treated with calf intestinal phosphatase. The linear vector is fractionated on agarose gel and purified, using glass beads.

[0910] The cDNA encoding a polypeptide of the present invention can be amplified using PCR primers which correspond to the 5′ and 3′ end sequences respectively as set forth in Example 1 using primers and having appropriate restriction sites and initiation/stop codons, if necessary. Preferably, the 5′ primer contains an EcoRI site and the 3′ primer includes a HindIII site. Equal quantities of the Moloney murine sarcoma virus linear backbone and the amplified EcoRI and HindIII fragment are added together, in the presence of T4 DNA ligase. The resulting mixture is maintained under conditions appropriate for ligation of the two fragments. The ligation mixture is then used to transform bacteria HB101, which are then plated onto agar containing kanamycin for the purpose of confirming that the vector has the gene of interest properly inserted.

[0911] The amphotropic pA317 or GP+am12 packaging cells are grown in tissue culture to confluent density in Dulbecco's Modified Eagles Medium (DMEM) with 10% calf serum (CS), penicillin and streptomycin. The MSV vector containing the gene is then added to the media and the packaging cells transduced with the vector. The packaging cells now produce infectious viral particles containing the gene (the packaging cells are now referred to as producer cells).

[0912] Fresh media is added to the transduced producer cells, and subsequently, the media is harvested from a 10 cm plate of confluent producer cells. The spent media, containing the infectious viral particles, is filtered through a millipore filter to remove detached producer cells and this media is then used to infect fibroblast cells. Media is removed from a sub-confluent plate of fibroblasts and quickly replaced with the media from the producer cells. This media is removed and replaced with fresh media. If the titer of virus is high, then virtually all fibroblasts will be infected and no selection is required. If the titer is very low, then it is necessary to use a retroviral vector that has a selectable marker, such as neo or his. Once the fibroblasts have been efficiently infected, the fibroblasts are analyzed to determine whether protein is produced.

[0913] The engineered fibroblasts are then transplanted onto the host, either alone or after having been grown to confluence on cytodex 3 microcarrier beads.

### Example 17

### Gene Therapy Using Endogenous Genes Corresponding to Polynucleotides of the Invention

[0914] Another method of gene therapy according to the present invention involves operably associating the endogenous polynucleotide sequence of the invention with a promoter via homologous recombination as described, for example, in U.S. Pat. No. 5,641,670, issued Jun. 24, 1997; International Publication NO: WO 96/29411, published Sep. 26, 1996; International Publication NO: WO 94/12650, published Aug. 4, 1994; Koller et al., Proc. Natl. Acad. Sci. USA, 86:8932-8935 (1989); and Zijlstra et al., Nature, 342:435-438 (1989). This method involves the activation of a gene which is present in the target cells, but which is not expressed in the cells, or is expressed at a lower level than desired.

[0915] Polynucleotide constructs are made which contain a promoter and targeting sequences, which are homologous to the 5′ non-coding sequence of endogenous polynucleotide sequence, flanking the promoter. The targeting sequence will be sufficiently near the 5′ end of the polynucleotide sequence so the promoter will be operably linked to the endogenous sequence upon homologous recombination. The promoter and the targeting sequences can be amplified using PCR. Preferably, the amplified promoter contains distinct restriction enzyme sites on the 5′ and 3′ ends. Preferably, the 3′ end of the first targeting sequence contains the same restriction enzyme site as the 5′ end of the amplified promoter and the 5′ end of the second targeting sequence contains the same restriction site as the 3′ end of the amplified promoter.

[0916] The amplified promoter and the amplified targeting sequences are digested with the appropriate restriction enzymes and subsequently treated with calf intestinal phosphatase. The digested promoter and digested targeting sequences are added together in the presence of T4 DNA ligase. The resulting mixture is maintained under conditions appropriate for ligation of the two fragments. The construct is size fractionated on an agarose gel, then purified by phenol extraction and ethanol precipitation.

[0917] In this Example, the polynucleotide constructs are administered as naked polynucleotides via electroporation. However, the polynucleotide constructs may also be administered with transfection-facilitating agents, such as liposomes, viral sequences, viral particles, precipitating agents, etc. Such methods of delivery are known in the art.

[0918] Once the cells are transfected, homologous recombination will take place which results in the promoter being operably linked to the endogenous polynucleotide sequence. This results in the expression of polynucleotide corresponding to the polynucleotide in the cell. Expression may be detected by immunological staining, or any other method known in the art.

[0919] Fibroblasts are obtained from a subject by skin biopsy. The resulting tissue is placed in DMEM+10% fetal calf serum. Exponentially growing or early stationary phase fibroblasts are trypsinized and rinsed from the plastic surface with nutrient medium. An aliquot of the cell suspension is removed for counting, and the remaining cells are subjected to centrifugation. The supernatant is aspirated and the pellet is resuspended in 5 ml of electroporation buffer (20 mM HEPES pH 7.3, 137 mM NaCl, 5 mM KCl, 0.7 mM Na₂ HPO₄, 6 mM dextrose). The cells are recentrifuged, the supernatant aspirated, and the cells resuspended in electroporation buffer containing 1 mg/ml acetylated bovine serum albumin. The final cell suspension contains approximately 3×10⁶ cells/ml. Electroporation should be performed immediately following resuspension.

[0920] Plasmid DNA is prepared according to standard techniques. For example, to construct a plasmid for targeting to the locus corresponding to the polynucleotide of the invention, plasmid pUC18 (MBI Fermentas, Amherst, N.Y.) is digested with HindIII. The CMV promoter is amplified by PCR with an XbaI site on the 5′ end and a BamHI site on the 3′ end. Two non-coding sequences are amplified via PCR: one non-coding sequence (fragment 1) is amplified with a HindIII site at the 5′ end and an Xba site at the 3′end; the other non-coding sequence (fragment 2) is amplified with a BamHI site at the 5′end and a HindIII site at the 3′end. The CMV promoter and the fragments (1 and 2) are digested with the appropriate enzymes (CMV promoter—XbaI and BamHI; fragment 1—XbaI; fragment 2—BamHI) and ligated together. The resulting ligation product is digested with HindIII, and ligated with the HindIII-digested pUC18 plasmid.

[0921] Plasmid DNA is added to a sterile cuvette with a 0.4 cm electrode gap (Bio-Rad). The final DNA concentration is generally at least 120 μg/ml. 0.5 ml of the cell suspension (containing approximately 1.5×10⁶ cells) is then added to the cuvette, and the cell suspension and DNA solutions are gently mixed. Electroporation is performed with a Gene-Pulser apparatus (Bio-Rad). Capacitance and voltage are set at 960 μF and 250-300 V, respectively. As voltage increases, cell survival decreases, but the percentage of surviving cells that stably incorporate the introduced DNA into their genome increases dramatically. Given these parameters, a pulse time of approximately 14-20 mSec should be observed.

[0922] Electroporated cells are maintained at room temperature for approximately 5 min, and the contents of the cuvette are then gently removed with a sterile transfer pipette. The cells are added directly to 10 ml of prewarmed nutrient media (DMEM with 15% calf serum) in a 10 cm dish and incubated at 37 degree C. The following day, the media is aspirated and replaced with 10 ml of fresh media and incubated for a further 16-24 hours.

[0923] The engineered fibroblasts are then injected into the host, either alone or after having been grown to confluence on cytodex 3 microcarrier beads. The fibroblasts now produce the protein product. The fibroblasts can then be introduced into a patient as described above.

### Example 18

### Method of Treatment Using Gene Therapy—In Vivo

[0924] Another aspect of the present invention is using in vivo gene therapy methods to prevent, treat, and/or ameliorate allergic and/or asthmatic diseases and disorders. The gene therapy method relates to the introduction of naked nucleic acid (DNA, RNA, and antisense DNA or RNA) sequences into an animal to increase or decrease the expression of the polypeptide. The polynucleotide of the present invention may be operatively linked to (i.e., associated with) a promoter or any other genetic elements necessary for the expression of the polypeptide by the target tissue. Such gene therapy and delivery techniques and methods are known in the art, see, for example, WO90/11092, WO98/11779; U.S. Pat. Nos. 5,693,622, 5,705,151, 5,580,859; Tabata et al., Cardiovasc. Res. 35(3):470-479 (1997); Chao et al., Pharmacol. Res. 35(6):517-522 (1997); Wolff, Neuromuscul. Disord. 7(5):314-318 (1997); Schwartz et al., Gene Ther. 3(5):405-411 (1996); Tsurumi et al., Circulation 94(12):3281-3290 (1996) (incorporated herein by reference).

[0925] The polynucleotide constructs may be delivered by any method that delivers injectable materials to the cells of an animal, such as, injection into the interstitial space of tissues (heart, muscle, skin, lung, liver, intestine and the like). The polynucleotide constructs can be delivered in a pharmaceutically acceptable liquid or aqueous carrier.

[0926] The term “naked” polynucleotide, DNA or RNA, refers to sequences that are free from any delivery vehicle that acts to assist, promote, or facilitate entry into the cell, including viral sequences, viral particles, liposome formulations, LIPOFECTIN™ or precipitating agents and the like. However, the polynucleotides of the present invention may also be delivered in liposome formulations (such as those taught in Felgner P. L. et al. (1995) Ann. NY Acad. Sci. 772:126-139 and Abdallah B. et al. (1995) Biol. Cell 85(1):1-7) which can be prepared by methods well known to those skilled in the art.

[0927] The polynucleotide vector constructs used in the gene therapy method are preferably constructs that will not integrate into the host genome nor will they contain sequences that allow for replication. Any strong promoter known to those skilled in the art can be used for driving the expression of DNA. Unlike other gene therapy techniques, one major advantage of introducing naked nucleic acid sequences into target cells is the transitory nature of the polynucleotide synthesis in the cells. Studies have shown that non-replicating DNA sequences can be introduced into cells to provide production of the desired polypeptide for periods of up to six months.

[0928] The polynucleotide construct can be delivered to the interstitial space of tissues within an animal, including muscle, skin, brain, lung, liver, spleen, bone marrow, thymus, heart, lymph, blood, bone, cartilage, pancreas, kidney, gall bladder, stomach, intestine, testis, ovary, uterus, rectum, nervous system, eye, gland, and connective tissue. Interstitial space of the tissues comprises the intercellular fluid, mucopolysaccharide matrix among the reticular fibers of organ tissues, elastic fibers in the walls of vessels or chambers, collagen fibers of fibrous tissues, or that same matrix within connective tissue ensheathing muscle cells or in the lacunae of bone. It is similarly the space occupied by the plasma of the circulation and the lymph fluid of the lymphatic channels. Delivery to the interstitial space of muscle tissue is preferred for the reasons discussed below. They may be conveniently delivered by injection into the tissues comprising these cells. They are preferably delivered to and expressed in persistent, non-dividing cells which are differentiated, although delivery and expression may be achieved in non-differentiated or less completely differentiated cells, such as, for example, stem cells of blood or skin fibroblasts. In vivo muscle cells are particularly competent in their ability to take up and express polynucleotides.

[0929] For the naked polynucleotide injection, an effective dosage amount of DNA or RNA will be in the range of from about 0.05 g/kg body weight to about 50 mg/kg body weight. Preferably the dosage will be from about 0.005 mg/kg to about 20 mg/kg and more preferably from about 0.05 mg/kg to about 5 mg/kg. Of course, as the artisan of ordinary skill will appreciate, this dosage will vary according to the tissue site of injection. The appropriate and effective dosage of nucleic acid sequence can readily be determined by those of ordinary skill in the art and may depend on the condition being treated and the route of administration. The preferred route of administration is by the parenteral route of injection into the interstitial space of tissues. However, other parenteral routes may also be used, such as, inhalation of an aerosol formulation particularly for delivery to lungs or bronchial tissues, throat or mucous membranes of the nose. In addition, naked polynucleotide constructs can be delivered to arteries during angioplasty by the catheter used in the procedure.

[0930] The dose response effects of injected polynucleotide in muscle in vivo is determined as follows. Suitable template DNA for production of mRNA coding for polypeptide of the present invention is prepared in accordance with a standard recombinant DNA methodology. The template DNA, which may be either circular or linear, is either used as naked DNA or complexed with liposomes. The quadriceps muscles of mice are then injected with various amounts of the template DNA.

[0931] Five to six week old female and male Balb/C mice are anesthetized by intraperitoneal injection with 0.3 ml of 2.5% Avertin. A 1.5 cm incision is made on the anterior thigh, and the quadriceps muscle is directly visualized. The template DNA is injected in 0.1 ml of carrier in a 1 cc syringe through a 27 gauge needle over one minute, approximately 0.5 cm from the distal insertion site of the muscle into the knee and about 0.2 cm deep. A suture is placed over the injection site for future localization, and the skin is closed with stainless steel clips.

[0932] After an appropriate incubation time (e.g., 7 days) muscle extracts are prepared by excising the entire quadriceps. Every fifth 15 um cross-section of the individual quadriceps muscles is histochemically stained for protein expression. A time course for protein expression may be done in a similar fashion except that quadriceps from different mice are harvested at different times. Persistence of DNA in muscle following injection may be determined by Southern blot analysis after preparing total cellular DNA and HIRT supernatants from injected and control mice. The results of the above experimentation in mice can be used to extrapolate proper dosages and other treatment parameters in humans and other animals using naked DNA.

### Example 19

### Transgenic Animals

[0933] The polypeptides of the invention can also be expressed in transgenic animals. Animals of any species, including, but not limited to, mice, rats, rabbits, hamsters, guinea pigs, pigs, micro-pigs, goats, sheep, cows and non-human primates, e.g., baboons, monkeys, and chimpanzees may be used to generate transgenic animals. In a specific embodiment, techniques described herein or otherwise known in the art, are used to express polypeptides of the invention in humans, as part of a gene therapy protocol.

[0934] Any technique known in the art may be used to introduce the transgene (i.e., polynucleotides of the invention) into animals to produce the founder lines of transgenic animals. Such techniques include, but are not limited to, pronuclear microinjection (Paterson et al., Appl. Microbiol. Biotechnol. 40:691-698 (1994); Carver et al., Biotechnology (NY) 11:1263-1270 (1993); Wright et al., Biotechnology (NY) 9:830-834 (1991); and Hoppe et al., U.S. Pat. No. 4,873,191 (1989)); retrovirus mediated gene transfer into germ lines (Van der Putten et al., Proc. Natl. Acad. Sci., USA 82:6148-6152 (1985)), blastocysts or embryos; gene targeting in embryonic stem cells (Thompson et al., Cell 56:313-321 (1989)); electroporation of cells or embryos (Lo, 1983, Mol Cell. Biol. 3:1803-1814 (1983)); introduction of the polynucleotides of the invention using a gene gun (see, e.g., Ulmer et al., Science 259:1745 (1993); introducing nucleic acid constructs into embryonic pleuripotent stem cells and transferring the stem cells back into the blastocyst; and sperm-mediated gene transfer (Lavitrano et al., Cell 57:717-723 (1989); etc. For a review of such techniques, see Gordon, “Transgenic Animals,” Intl. Rev. Cytol. 115:171-229 (1989), which is incorporated by reference herein in its entirety.

[0935] Any technique known in the art may be used to produce transgenic clones containing polynucleotides of the invention, for example, nuclear transfer into enucleated oocytes of nuclei from cultured embryonic, fetal, or adult cells induced to quiescence (Campell et al., Nature 380:64-66 (1996); Wilmut et al., Nature 385:810-813 (1997)).

[0936] The present invention provides for transgenic animals that carry the transgene in all their cells, as well as animals which carry the transgene in some, but not all their cells, i.e., mosaic animals or chimeric. The transgene may be integrated as a single transgene or as multiple copies such as in concatamers, e.g., head-to-head tandems or head-to-tail tandems. The transgene may also be selectively introduced into and activated in a particular cell type by following, for example, the teaching of Lasko et al. (Lasko et al., Proc. Natl. Acad. Sci. USA 89:6232-6236 (1992)). The regulatory sequences required for such a cell-type specific activation will depend upon the particular cell type of interest, and will be apparent to those of skill in the art. When it is desired that the polynucleotide transgene be integrated into the chromosomal site of the endogenous gene, gene targeting is preferred. Briefly, when such a technique is to be utilized, vectors containing some nucleotide sequences homologous to the endogenous gene are designed for the purpose of integrating, via homologous recombination with chromosomal sequences, into and disrupting the function of the nucleotide sequence of the endogenous gene. The transgene may also be selectively introduced into a particular cell type, thus inactivating the endogenous gene in only that cell type, by following, for example, the teaching of Gu et al. (Gu et al., Science 265:103-106 (1994)). The regulatory sequences required for such a cell-type specific inactivation will depend upon the particular cell type of interest, and will be apparent to those of skill in the art.

[0937] Once transgenic animals have been generated, the expression of the recombinant gene may be assayed utilizing standard techniques. Initial screening may be accomplished by Southern blot analysis or PCR techniques to analyze animal tissues to verify that integration of the transgene has taken place. The level of mRNA expression of the transgene in the tissues of the transgenic animals may also be assessed using techniques which include, but are not limited to, Northern blot analysis of tissue samples obtained from the animal, in situ hybridization analysis, and reverse transcriptase-PCR (rt-PCR). Samples of transgenic gene-expressing tissue may also be evaluated immunocytochemically or immunohistochemically using antibodies specific for the transgene product.

[0938] Once the founder animals are produced, they may be bred, inbred, outbred, or crossbred to produce colonies of the particular animal. Examples of such breeding strategies include, but are not limited to: outbreeding of founder animals with more than one integration site in order to establish separate lines; inbreeding of separate lines in order to produce compound transgenics that express the transgene at higher levels because of the effects of additive expression of each transgene; crossing of heterozygous transgenic animals to produce animals homozygous for a given integration site in order to both augment expression and eliminate the need for screening of animals by DNA analysis; crossing of separate homozygous lines to produce compound heterozygous or homozygous lines; and breeding to place the transgene on a distinct background that is appropriate for an experimental model of interest.

[0939] Transgenic animals of the invention have uses which include, but are not limited to, animal model systems useful in elaborating the biological function of polypeptides of the present invention, studying conditions and/or disorders associated with aberrant expression, and in screening for compounds effective in ameliorating such conditions and/or disorders.

### Example 20

### Knock-Out Animals

[0940] Endogenous gene expression can also be reduced by inactivating or “knocking out” the gene and/or its promoter using targeted homologous recombination. (e.g., see Smithies et al., Nature 317:230-234 (1985); Thomas & Capecchi, Cell 51:503-512 (1987); Thompson et al., Cell 5:313-321 (1989); each of which is incorporated by reference herein in its entirety). For example, a mutant, non-functional polynucleotide of the invention (or a completely unrelated DNA sequence) flanked by DNA homologous to the endogenous polynucleotide sequence (either the coding regions or regulatory regions of the gene) can be used, with or without a selectable marker and/or a negative selectable marker, to transfect cells that express polypeptides of the invention in vivo. In another embodiment, techniques known in the art are used to generate knockouts in cells that contain, but do not express the gene of interest. Insertion of the DNA construct, via targeted homologous recombination, results in inactivation of the targeted gene. Such approaches are particularly suited in research and agricultural fields where modifications to embryonic stem cells can be used to generate animal offspring with an inactive targeted gene (e.g., see Thomas & Capecchi 1987 and Thompson 1989, supra). However this approach can be routinely adapted for use in humans provided the recombinant DNA constructs are directly administered or targeted to the required site in vivo using appropriate viral vectors that will be apparent to those of skill in the art.

[0941] In further embodiments of the invention, cells that are genetically engineered to express the polypeptides of the invention, or alternatively, that are genetically engineered not to express the polypeptides of the invention (e.g., knockouts) are administered to a patient in vivo. Such cells may be obtained from the patient (i.e., animal, including human) or an MHC compatible donor and can include, but are not limited to fibroblasts, bone marrow cells, blood cells (e.g., lymphocytes), adipocytes, muscle cells, endothelial cells etc. The cells are genetically engineered in vitro using recombinant DNA techniques to introduce the coding sequence of polypeptides of the invention into the cells, or alternatively, to disrupt the coding sequence and/or endogenous regulatory sequence associated with the polypeptides of the invention, e.g., by transduction (using viral vectors, and preferably vectors that integrate the transgene into the cell genome) or transfection procedures, including, but not limited to, the use of plasmids, cosmids, YACs, naked DNA, electroporation, liposomes, etc. The coding sequence of the polypeptides of the invention can be placed under the control of a strong constitutive or inducible promoter or promoter/enhancer to achieve expression, and preferably secretion, of the polypeptides of the invention. The engineered cells which express and preferably secrete the polypeptides of the invention can be introduced into the patient systemically, e.g., in the circulation, or intraperitoneally.

[0942] Alternatively, the cells can be incorporated into a matrix and implanted in the body, e.g., genetically engineered fibroblasts can be implanted as part of a skin graft; genetically engineered endothelial cells can be implanted as part of a lymphatic or vascular graft. (See, for example, Anderson et al. U.S. Pat. No. 5,399,349; and Mulligan & Wilson, U.S. Pat. No. 5,460,959 each of which is incorporated by reference herein in its entirety).

[0943] When the cells to be administered are non-autologous or non-MHC compatible cells, they can be administered using well known techniques which prevent the development of a host immune response against the introduced cells. For example, the cells may be introduced in an encapsulated form which, while allowing for an exchange of components with the immediate extracellular environment, does not allow the introduced cells to be recognized by the host immune system.

[0944] Transgenic and “knock-out” animals of the invention have uses which include, but are not limited to, animal model systems useful in elaborating the biological function of polypeptides of the present invention, studying conditions and/or disorders associated with aberrant expression, and in screening for compounds effective in ameliorating such conditions and/or disorders.

### Example 21

### Assays Detecting Stimulation or Inhibition of B cell Proliferation and Differentiation

[0945] Generation of functional humoral immune responses requires both soluble and cognate signaling between B-lineage cells and their microenvironment. Signals may impart a positive stimulus that allows a B-lineage cell to continue its programmed development, or a negative stimulus that instructs the cell to arrest its current developmental pathway. To date, numerous stimulatory and inhibitory signals have been found to influence B cell responsiveness including IL-2, IL4, IL-5, IL-6, IL-7, IL1, IL-13, IL-14 and IL-15. Interestingly, these signals are by themselves weak effectors but can, in combination with various co-stimulatory proteins, induce activation, proliferation, differentiation, homing, tolerance and death among B cell populations.

[0946] One of the best studied classes of B-cell co-stimulatory proteins is the TNF-superfamily. Within this family CD40, CD27, and CD30 along with their respective ligands CD154, CD70, and CD153 have been found to regulate a variety of immune responses. Assays which allow for the detection and/or observation of the proliferation and differentiation of these B-cell populations and their precursors are valuable tools in determining the effects various proteins may have on these Bell populations in terms of proliferation and differentiation. Listed below are two assays designed to allow for the detection of the differentiation, proliferation, or inhibition of B-cell populations and their precursors.

[0947] In Vitro Assay—Agonists or antagonists of the invention can be assessed for its ability to induce activation, proliferation, differentiation or inhibition and/or death in B-cell populations and their precursors. The activity of the agonists or antagonists of the invention on purified human tonsillar B cells, measured qualitatively over the dose range from 0.1 to 10,000 ng/mL, is assessed in a standard B-lymphocyte co-stimulation assay in which purified tonsillar B cells are cultured in the presence of either formalin-fixed Staphylococcus aureus Cowan I (SAC) or immobilized anti-human IgM antibody as the priming agent. Second signals such as IL-2 and IL-15 synergize with SAC and IgM crosslinking to elicit B cell proliferation as measured by tritiated-thymidine incorporation. Novel synergizing agents can be readily identified using this assay. The assay involves isolating human tonsillar B cells by magnetic bead (MACS) depletion of CD3-positive cells. The resulting cell population is greater than 95% B cells as assessed by expression of CD45R(B220).

[0948] Various dilutions of each sample are placed into individual wells of a 96-well plate to which are added 10⁵ B-cells suspended in culture medium (RPMI 1640 containing 10% FBS, 5×10⁻⁵M 2ME, 100 U/ml penicillin, 10 ug/ml streptomycin, and 10⁻⁵ dilution of SAC) in a total volume of 150 ul. Proliferation or inhibition is quantitated by a 20 h pulse (1 uCi/well) with 3H-thymidine (6.7 Ci/mM) beginning 72 h post factor addition. The positive and negative controls are IL2 and medium respectively.

[0949] In vivo Assay—BALB/c mice are injected (i.p.) twice per day with buffer only, or 2 mg/Kg of agonists or antagonists of the invention, or truncated forms thereof. Mice receive this treatment for 4 consecutive days, at which time they are sacrificed and various tissues and serum collected for analyses. Comparison of H&E sections from normal spleens and spleens treated with agonists or antagonists of the invention identify the results of the activity of the agonists or antagonists on spleen cells, such as the diffusion of peri-arterial lymphatic sheaths, and/or significant increases in the nucleated cellularity of the red pulp regions, which may indicate the activation of the differentiation and proliferation of B-cell populations. Immunohistochemical studies using a B cell marker, anti-CD45R(B220), are used to determine whether any physiological changes to splenic cells, such as splenic disorganization, are due to increased B-cell representation within loosely defined B-cell zones that infiltrate established T-cell regions.

[0950] Flow cytometric analyses of the spleens from mice treated with agonist or antagonist is used to indicate whether the agonists or antagonists specifically increases the proportion of ThB+, CD45R(B220)dull B cells over that which is observed in control mice.

[0951] Likewise, a predicted consequence of increased mature B-cell representation in vivo is a relative increase in serum Ig titers. Accordingly, serum IgM and IgA levels are compared between buffer and agonists or antagonists-treated mice.

[0952] The studies described in this example tested activity of agonists or antagonists of the invention. However, one skilled in the art could easily modify the exemplified studies to test the activity of polynucleotides or polypeptides of the invention (e.g., gene therapy).

### Example 22

### T Cell Proliferation Assay

[0953] A CD3-induced proliferation assay is performed on PBMCs and is measured by the uptake of ³H-thymidine. The assay is performed as follows. Ninety-six well plates are coated with 100 μl/well of mAb to CD3 (HIT3a, Pharmingen) or isotype-matched control mAb (B33.1) overnight at 4 degrees C. (1 μg/ml in 0.05M bicarbonate buffer, pH 9.5), then washed three times with PBS. PBMC are isolated by F/H gradient centrifugation from human peripheral blood and added to quadruplicate wells (5×10⁴/well) of mAb coated plates in RPMI containing 10% FCS and P/S in the presence of varying concentrations of agonists or antagonists of the invention (total volume 200 μl). Relevant protein buffer and medium alone are controls. After 48 hr. culture at 37 degrees C., plates are spun for 2 min. at 1000 rpm and 100 μl of supernatant is removed and stored −20 degrees C. for measurement of IL-2 (or other cytokines) if effect on proliferation is observed. Wells are supplemented with 100 μl of medium containing 0.5 μCi of ³H-thymidine and cultured at 37 degrees C. for 18-24 hr. Wells are harvested and incorporation of ³H-thymidine used as a measure of proliferation. Anti-CD3 alone is the positive control for proliferation. IL-2 (100 U/ml) is also used as a control which enhances proliferation. Control antibody which does not induce proliferation of T cells is used as the negative control for the effects of agonists or antagonists of the invention.

[0954] The studies described in this example tested activity of agonists or antagonists of the invention. However, one skilled in the art could easily modify the exemplified studies to test the activity of polynucleotides or polypeptides of the invention (e.g., gene therapy).

### Example 23

### Effect of Agonists or Antagonists of the Invention on the Expression of MHC Class II, Costimulatory and Adhesion Molecules and Cell Differentiation of Monocytes and Monocyte-Derived Human Dendritic Cells

[0955] Dendritic cells are generated by the expansion of proliferating precursors found in the peripheral blood: adherent PBMC or elutriated monocytic fractions are cultured for 7-10 days with GM-CSF (50 ng/ml) and IL4 (20-ng/ml). These dendritic cells have the characteristic phenotype of immature cells (expression of CD1, CD80, CD86, CD40 and MHC class II antigens). Treatment with activating factors, such as TNF-α, causes a rapid change in surface phenotype (increased expression of MHC class I and II, costimulatory and adhesion molecules, downregulation of FCγ RII, upregulation of CD83). These changes correlate with increased antigen-presenting capacity and with functional maturation of the dendritic cells.

[0956] FACS analysis of surface antigens is performed as follows. Cells are treated 1-3 days with increasing concentrations of agonist or antagonist of the invention or LPS (positive control), washed with PBS containing 1% BSA and 0.02 mM sodium azide, and then incubated with 1:20 dilution of appropriate FITC- or PE-labeled monoclonal antibodies for 30 minutes at 4 degrees C. After an additional wash, the labeled cells are analyzed by flow cytometry on a FACScan (Becton Dickinson).

[0957] Effect on the production of cytokines. Cytokines generated by dendritic cells, in particular IL-12, are important in the initiation of T-cell dependent immune responses. IL-12 strongly influences the development of Thl helper Tell immune response, and induces cytotoxic T and NK cell function. An ELISA is used to measure the IL-12 release as follows. Dendritic cells (10⁶/ml) are treated with increasing concentrations of agonists or antagonists of the invention for 24 hours. LPS (100 ng/ml) is added to the cell culture as positive control. Supernatants from the cell cultures are then collected and analyzed for IL-12 content using commercial ELISA kit (e.g., R & D Systems (Minneapolis, Minn.)). The standard protocols provided with the kits are used.

[0958] Effect on the expression of MHC Class II, costimulatory and adhesion molecules. Three major families of cell surface antigens can be identified on monocytes: adhesion molecules, molecules involved in antigen presentation, and Fe receptor. Modulation of the expression of MHC class II antigens and other costimulatory molecules, such as B7 and ICAM-1, may result in changes in the antigen presenting capacity of monocytes and ability to induce T cell activation. Increased expression of Fe receptors may correlate with improved monocyte cytotoxic activity, cytokine release and phagocytosis.

[0959] FACS analysis is used to examine the surface antigens as follows. Monocytes are treated 1-5 days with increasing concentrations of agonists or antagonists of the invention or LPS (positive control), washed with PBS containing 1% BSA and 0.02 mM sodium azide, and then incubated with 1:20 dilution of appropriate FITC- or PE-labeled monoclonal antibodies for 30 minutes at 4 degrees C. After an additional wash, the labeled cells are analyzed by flow cytometry on a FACScan (Becton Dickinson).

[0960] Monocyte activation and/or increased survival. Assays for molecules that activate (or alternatively, inactivate) monocytes and/or increase monocyte survival (or alternatively, decrease monocyte survival) are known in the art and may routinely be applied to determine whether a molecule of the invention functions as an inhibitor or activator of monocytes. Agonists or antagonists of the invention can be screened using the three assays described below. For each of these assays, Peripheral blood mononuclear cells (PBMC) are purified from single donor leukopacks (American Red Cross, Baltimore, Md.) by centrifugation through a HISTOPAQUE™ gradient (SIGMA™). Monocytes are isolated from PBMC by counterflow centrifugal elutriation.

[0961] Monocyte Survival Assay. Human peripheral blood monocytes progressively lose viability when cultured in absence of serum or other stimuli. Their death results from internally regulated processes (apoptosis). Addition to the culture of activating factors, such as TNF-alpha dramatically improves cell survival and prevents DNA fragmentation. Propidium iodide (PI) staining is used to measure apoptosis as follows. Monocytes are cultured for 48 hours in polypropylene tubes in serum-free medium (positive control), in the presence of 100 ng/ml TNF-alpha (negative control), and in the presence of varying concentrations of the compound to be tested. Cells are suspended at a concentration of 2×10⁶/ml in PBS containing PI at a final concentration of 5 μg/ml, and then incubated at room temperature for 5 minutes before FACScan analysis. PI uptake has been demonstrated to correlate with DNA fragmentation in this experimental paradigm.

[0962] Effect on cytokine release. An important function of monocytes/macrophages is their regulatory activity on other cellular populations of the immune system through the release of cytokines after stimulation. An ELISA to measure cytokine release is performed as follows. Human monocytes are incubated at a density of 5×10⁵ cells/ml with increasing concentrations of agonists or antagonists of the invention and under the same conditions, but in the absence of agonists or antagonists. For IL-12 production, the cells are primed overnight with IFN (100 U/ml) in the presence of agonist or antagonist of the invention. LPS (10 ng/ml) is then added. Conditioned media are collected after 24 h and kept frozen until use. Measurement of TNF-alpha, IL-10, MCP-1 and IL-8 is then performed using a commercially available ELISA kit (e.g., R & D Systems (Minneapolis, Minn.)) and applying the standard protocols provided with the kit.

[0963] Oxidative burst. Purified monocytes are plated in 96-w plate at 2-1×10⁵ cell/well. Increasing concentrations of agonists or antagonists of the invention are added to the wells in a total volume of 0.2 ml culture medium (RPMI 1640+10% FCS, glutamine and antibiotics). After 3 days incubation, the plates are centrifuged and the medium is removed from the wells. To the macrophage monolayers, 0.2 ml per well of phenol red solution (140 mM NaCl, 10 mM potassium phosphate buffer pH 7.0, 5.5 mM dextrose, 0.56 mM phenol red and 19 U/ml of HRPO) is added, together with the stimulant (200 nM PMA). The plates are incubated at 37° C. for 2 hours and the reaction is stopped by adding 20 μl 1N NaOH per well. The absorbance is read at 610 nm. To calculate the amount of H₂O₂ produced by the macrophages, a standard curve of a H₂O₂ solution of known molarity is performed for each experiment.

[0964] The studies described in this example tested activity of agonists or antagonists of the invention. However, one skilled in the art could easily modify the exemplified studies to test the activity of polynucleotides or polypeptides of the invention (e.g., gene therapy).

### Example 24

### Suppression of TNF Alpha-Induced Adhesion Molecule Expression by an Agonist or Antagonist of the Invention

[0965] The recruitment of lymphocytes to areas of inflammation and angiogenesis involves specific receptor-ligand interactions between cell surface adhesion molecules (CAMs) on lymphocytes and the vascular endothelium. The adhesion process, in both normal and pathological settings, follows a multi-step cascade that involves intercellular adhesion molecule-1 (ICAM-1), vascular cell adhesion molecule-1 (VCAM-1), and endothelial leukocyte adhesion molecule-1 (E-selectin) expression on endothelial cells (EC). The expression of these molecules and others on the vascular endothelium determines the efficiency with which leukocytes may adhere to the local vasculature and extravasate into the local tissue during the development of an inflammatory response. The local concentration of cytokines and growth factor participate in the modulation of the expression of these CAMs.

[0966] Tumor necrosis factor alpha (TNF-a), a potent proinflammatory cytokine, is a stimulator of all three CAMs on endothelial cells and may be involved in a wide variety of inflammatory responses, often resulting in a pathological outcome.

[0967] The potential of an agonist or antagonist of the invention to mediate a suppression of TNF-a induced CAM expression can be examined. A modified ELISA assay which uses ECs as a solid phase absorbent is employed to measure the amount of CAM expression on TNF-a treated ECs when co-stimulated with a member of the FGF family of proteins.

[0968] To perform the experiment, human umbilical vein endothelial cell (HUVEC) cultures are obtained from pooled cord harvests and maintained in growth medium (EGM-2; Clonetics, San Diego, Calif.) supplemented with 10% FCS and 1% penicillin/streptomycin in a 37 degree C. humidified incubator containing 5% CO₂. HUVECs are seeded in 96-well plates at concentrations of 1×10⁴ cells/well in EGM medium at 37 degree C. for 18-24 hrs or until confluent. The monolayers are subsequently washed 3 times with a serum-free solution of RPMI-1640 supplemented with 100 U/ml penicillin and 100 mg/ml streptomycin, and treated with a given cytokine and/or growth factor(s) for 24 h at 37 degree C. Following incubation, the cells are then evaluated for CAM expression.

[0969] Human Umbilical Vein Endothelial cells (HUVECs) are grown in a standard 96 well plate to confluence. Growth medium is removed from the cells and replaced with 90 ul of 199 Medium (10% FBS). Samples for testing and positive or negative controls are added to the plate in triplicate (in 10 μl volumes). Plates are incubated at 37 degree C. for either 5 h (selectin and integrin expression) or 24 h (integrin expression only). Plates are aspirated to remove medium and 100 μl of 0.1% paraformaldehyde-PBS(with Ca++ and Mg++) is added to each well. Plates are held at 4° C. for 30 min.

[0970] Fixative is then removed from the wells and wells are washed 1× with PBS(+Ca,Mg)+0.5% BSA and drained. Do not allow the wells to dry. Add 10 μl of diluted primary antibody to the test and control wells. Anti-ICAM-1-Biotin, Anti-VCAM-1-Biotin and Anti-E-selectin-Biotin are used at a concentration of 10 μg/ml (1:10 dilution of 0.1 mg/ml stock antibody). Cells are incubated at 37° C. for 30 min. in a humidified environment. Wells are washed X3 with PBS(+Ca,Mg)+0.5% BSA.

[0971] Then add 20 μl of diluted ExtrAvidin-Alkaline Phosphotase (1:5,000 dilution) to each well and incubated at 37° C. for 30 min. Wells are washed X3 with PBS(+Ca,Mg)+0.5% BSA. 1 tablet of p-Nitrophenol Phosphate pNPP is dissolved in 5 ml of glycine buffer (pH 10.4). 100 μl of pNPP substrate in glycine buffer is added to each test well. Standard wells in triplicate are prepared from the working dilution of the ExtrAvidin-Alkaline Phosphotase in glycine buffer: 1:5,000 (10⁰)>10^{-0.5}>10⁻¹>10^{-1.5}. 5 μl of each dilution is added to triplicate wells and the resulting AP content in each well is 5.50 ng, 1.74 ng, 0.55 ng, 0.18 ng. 100 μl of pNNP reagent must then be added to each of the standard wells. The plate must be incubated at 37° C. for 4 h. A volume of 50 μl of 3M NaOH is added to all wells. The results are quantified on a plate reader at 405 nm. The background subtraction option is used on blank wells filled with glycine buffer only. The template is set up to indicate the concentration of AP-conjugate in each standard well [5.50 ng; 1.74 ng; 0.55 ng; 0.18 ng]. Results are indicated as amount of bound AP-conjugate in each sample.

[0972] The studies described in this example tested activity of agonists or antagonists of the invention. However, one skilled in the art could easily modify the exemplified studies to test the activity of polynucleotides or polypeptides of the invention (e.g., gene therapy).

### Example 25

### Production of Polypeptide of the Invention for High-Throughput Screening Assays

[0973] The following protocol produces a supernatant containing polypeptide of the present invention to be tested. This supernatant can then be used in the Screening Assays described in Examples 27-34.

[0974] First, dilute Poly-D-Lysine (644 587 Boehringer-Mannheim) stock solution (1 mg/ml in PBS) 1:20 in PBS (w/o calcium or magnesium 17-516F Biowhittaker) for a working solution of 50 ug/ml. Add 200 μl of this solution to each well (24 well plates) and incubate at RT for 20 minutes. Be sure to distribute the solution over each well (note: a 12-channel pipetter may be used with tips on every other channel). Aspirate off the Poly-D-Lysine solution and rinse with 1 ml PBS (Phosphate Buffered Saline). The PBS should remain in the well until just prior to plating the cells and plates may be poly-lysine coated in advance for up to two weeks.

[0975] Plate 293T cells (do not carry cells past P+20) at 2×10⁵ cells/well in 0.5 ml DMEM(Dulbecco's Modified Eagle Medium)(with 4.5 G/L glucose and L-glutamine (12-604F Biowhittaker))/10% heat inactivated FBS(14-503F Biowhittaker)/1×Penstrep(17-602E Biowhittaker). Let the cells grow overnight.

[0976] The next day, mix together in a sterile solution basin: 300 μl Lipofectamine (18324-012 Gibco/BRL) and 5 ml OPTI-MEM™ 1 (31985070 Gibco/BRL)/96-well plate. With a small volume multi-channel pipetter, aliquot approximately 2 ug of an expression vector containing a polynucleotide insert, produced by the methods described in Examples 8-10, into an appropriately labeled 96-well round bottom plate. With a multi-channel pipetter, add 50 μl of the Lipofectamine/OPTI-MEM™ 1 mixture to each well. Pipette up and down gently to mix. Incubate at RT 1545 minutes. After about 20 minutes, use a multi-channel pipetter to add 1501 μl OPTI-MEM™ 1 to each well. As a control, one plate of vector DNA lacking an insert should be transfected with each set of transfections.

[0977] Preferably, the transfection should be performed by tag-teaming the following tasks. By tag-teaming, hands on time is cut in half, and the cells do not spend too much time on PBS. First, person A aspirates off the media from four 24-well plates of cells, and then person B rinses each well with 0.5-1 ml PBS. Person A then aspirates off PBS rinse, and person B, using a12-channel pipetter with tips on every other channel, adds the 200 μl of DNA/Lipofectamine/OPTI-MEM™ 1 complex to the odd wells first, then to the even wells, to each row on the 24-well plates. Incubate at 37 degree C. for 6 hours.

[0978] While cells are incubating, prepare appropriate media, either 1% BSA in DMEM with 1×penstrep, or HGS CHO-5 media (116.6 mg/L of CaCl2 (anhyd); 0.00130 mg/L CuSO₄-5H₂O; 0.050 mg/L of Fe(NO₃)₃-9H₂O; 0.417 mg/L of FeSO₄-7H₂O; 311.80 mg/L of Kcl; 28.64 mg/L of MgCl₂; 48.84 mg/L of MgSO₄; 6995.50 mg/L of NaCl; 2400.0 mg/L of NaHCO₃; 62.50 mg/L of NaH₂PO₄—H₂0; 71.02 mg/L of Na₂HPO4; 0.4320 mg/L of ZnSO₄-7H₂O; 0.002 mg/L of Arachidonic Acid; 1.022 mg/L of Cholesterol; 0.070 mg/L of DL-alpha-Tocopherol-Acetate; 0.0520 mg/L of Linoleic Acid; 0.010 mg/L of Linolenic Acid; 0.010 mg/L of Myristic Acid; 0.010 mg/L of Oleic Acid; 0.010 mg/L of Palmitric Acid; 0.010 mg/L of Palmitic Acid; 100 mg/L of Pluronic F-68; 0.010 mg/L of Stearic Acid; 2.20 mg/L of Tween 80; 4551 mg/L of D-Glucose; 130.85 mg/ml of L-Alanine; 147.50 mg/ml of L-Arginine-HCL; 7.50 mg/ml of L-Asparagine-H₂0; 6.65 mg/ml of L-Aspartic Acid; 29.56 mg/ml of L-Cystine-2HCL-H₂0; 31.29 mg/ml of L-Cystine-2HCL; 7.35 mg/ml of L-Glutamic Acid; 365.0 mg/ml of L-Glutamine; 18.75 mg/ml of Glycine; 52.48 mg/ml of L-Histidine-HCL-H₂0; 106.97 mg/ml of L-Isoleucine; 111.45 mg/ml of L-Leucine; 163.75 mg/ml of L-Lysine HCL; 32.34 mg/ml of L-Methionine; 68.48 mg/ml of L-Phenylalainine; 40.0 mg/ml of L-Proline; 26.25 mg/ml of L-Serine; 101.05 mg/ml of L-Threonine; 19.22 mg/ml of L-Tryptophan; 91.79 mg/ml of L-Tryrosine-2Na-2H₂0; and 99.65 mg/ml of L-Valine; 0.0035 mg/L of Biotin; 3.24 mg/L of D-Ca Pantothenate; 11.78 mg/L of Choline Chloride; 4.65 mg/L of Folic Acid; 15.60 mg/L of i-inositol; 3.02 mg/L of Niacinamide; 3.00 mg/L of Pyridoxal HCL; 0.031 mg/L of Pyridoxine HCL; 0.319 mg/L of Riboflavin; 3.17 mg/L of Thiamine HCL; 0.365 mg/L of Thymidine; 0.680 mg/L of Vitamin B₁₂; 25 mM of HEPES Buffer; 2.39 mg/L of Na Hypoxanthine; 0.105 mg/L of Lipoic Acid; 0.081 mg/L of Sodium Putrescine-2HCL; 55.0 mg/L of Sodium Pyruvate; 0.0067 mg/L of Sodium Selenite; 20 uM of Ethanolamine; 0.122 mg/L of Ferric Citrate; 41.70 mg/L of Methyl-B-Cyclodextrin complexed with Linoleic Acid; 33.33 mg/L of Methyl-B-Cyclodextrin complexed with Oleic Acid; 10 mg/L of Methyl-B-Cyclodextrin complexed with Retinal Acetate. Adjust osmolarity to 327 mOsm) with 2 mm glutamine and 1×penstrep. (BSA (81-068-3 Bayer) 100 gm dissolved in 1 L DMEM for a 10% BSA stock solution). Filter the media and collect 50 μl for endotoxin assay in 15 ml polystyrene conical.

[0979] The transfection reaction is terminated, preferably by tag-teaming, at the end of the incubation period. Person A aspirates off the transfection media, while person B adds 1.5 ml appropriate media to each well. Incubate at 37 degree C. for 45 or 72 hours depending on the media used: 1% BSA for 45 hours or CHO-5 for 72 hours.

[0980] On day four, using a 300 μl multichannel pipetter, aliquot 600 μl in one 1 ml deep well plate and the remaining supernatant into a 2 ml deep well. The supernatants from each well can then be used in the assays described in Examples 27-33.

[0981] It is specifically understood that when activity is obtained in any of the assays described below using a supernatant, the activity originates from either the polypeptide of the present invention directly (e.g., as a secreted protein) or by polypeptide of the present invention inducing expression of other proteins, which are then secreted into the supernatant. Thus, the invention further provides a method of identifying the protein in the supernatant characterized by an activity in a particular assay.

### Example 26

### Construction of GAS Reporter Construct

[0982] One signal transduction pathway involved in the differentiation and proliferation of cells is called the Jaks-STATs pathway. Activated proteins in the Jaks-STATs pathway bind to gamma activation site “GAS” elements or interferon-sensitive responsive element (“ISRE”), located in the promoter of many genes. The binding of a protein to these elements alter the expression of the associated gene.

[0983] GAS and ISRE elements are recognized by a class of transcription factors called Signal Transducers and Activators of Transcription, or “STATs.” There are six members of the STATs family. Stat1 and Stat3 are present in many cell types, as is Stat2 (as response to IFN-alpha is widespread). Stat4 is more restricted and is not in many cell types though it has been found in T helper class 1, cells after treatment with IL-12. Stat5 was originally called mammary growth factor, but has been found at higher concentrations in other cells including myeloid cells. It can be activated in tissue culture cells by many cytokines.

[0984] The STATs are activated to translocate from the cytoplasm to the nucleus upon tyrosine phosphorylation by a set of kinases known as the Janus Kinase (“Jaks”) family. Jaks represent a distinct family of soluble tyrosine kinases and include Tyk2, Jak1, Jak2, and Jak3. These kinases display significant sequence similarity and are generally catalytically inactive in resting cells.

[0985] The Jaks are activated by a wide range of receptors summarized in the Table below. (Adapted from review by Schidler and Darnell, Ann. Rev. Biochem. 64:621-51 (1995)). A cytokine receptor family, capable of activating Jaks, is divided into two groups: (a) Class I includes receptors for IL-2, IL-3, IL-4, IL-6, IL-7, IL-9, IL-11, IL-12, IL-15, Epo, PRL, GH, G-CSF, GM-CSF, LIF, CNTF, and thrombopoietin; and (b) Class 2 includes IFN-a, IFN-G, and IL-10. The Class I receptors share a conserved cysteine motif (a set of four conserved cysteines and one tryptophan) and a WSXWS motif (a membrane proximal region encoding Trp-Ser-Xaa-Trp-Ser (SEQ ID NO: 2)).

[0986] Thus, on binding of a ligand to a receptor, Jaks are activated, which in turn activate STATs, which then translocate and bind to GAS elements. This entire process is encompassed in the Jaks-STATs signal transduction pathway. Therefore, activation of the Jak-s-STATs pathway, reflected by the binding of the GAS or the ISRE element, can be used to indicate proteins involved in the proliferation and differentiation of cells. For example, growth factors and cytokines are known to activate the Jaks-STATs pathway (See Table below). Thus, by using GAS elements linked to reporter molecules, activators of the Jaks-STATs pathway can be identified.

| | JAKs | | | | | |
|---|---|---|---|---|---|---|
| Ligand | tyk2 | Jak1 | Jak2 | Jak3 | STATS | GAS(elements) or ISRE |
| IFN family | | | | | | |
| IFN-a/B | + | + | − | − | 1, 2, 3 | ISRE |
| IFN-g | | + | + | − | 1 | GAS (IRF1 > Lys6 > IFP) |
| Il-10 | + | ? | ? | − | 1, 3 | |
| gp130 family | | | | | | |
| IL-6 (Pleiotropic) | + | + | + | ? | 1, 3 | GAS (IRF1 > Lys6 > IFP) |
| Il-11(Pleiotropic) | ? | + | ? | ? | 1, 3 | |
| OnM(Pleiotropic) | ? | + | + | ? | 1, 3 | |
| LIF(Pleiotropic) | ? | + | + | ? | 1, 3 | |
| CNTF(Pleiotropic) | −/+ | + | + | ? | 1, 3 | |
| G-CSF(Pleiotropic) | ? | + | ? | ? | 1, 3 | |
| IL-12(Pleiotropic) | + | − | + | + | 1, 3 | |
| g-C family | | | | | | |
| IL-2 (lymphocytes) | − | + | − | + | 1, 3, 5 | GAS |
| IL-4 (lymph/myeloid) | − | + | − | + | 6 | GAS (IRF1 = IFP >> Ly6)(IgH) |
| IL-7 (lymphocytes) | − | + | − | + | 5 | GAS |
| IL-9 (lymphocytes) | − | + | − | + | 5 | GAS |
| IL-13 (lymphocyte) | − | + | ? | ? | 6 | GAS |
| IL-15 | ? | + | ? | + | 5 | GAS |
| gp140 family | | | | | | |
| IL-3 (myeloid) | − | − | + | − | 5 | GAS (IRF1 > IFP >> Ly6) |
| IL-5 (myeloid) | − | − | + | − | 5 | GAS |
| GM-CSF (myeloid) | − | − | + | − | 5 | GAS |
| Growth hormone family | | | | | | |
| GH | ? | − | + | − | 5 | |
| PRL | ? | +/− | + | − | 1, 3, 5 | |
| EPO | ? | − | + | − | 5 | GAS(B-CAS > IRF1 = IFP >> Ly6) |
| Receptor Tyrosine Kinases | | | | | | |
| EGF | ? | + | + | − | 1, 3 | GAS (IRF1) |
| PDGF | ? | + | + | − | 1, 3 | |
| CSF-1 | ? | + | + | − | 1, 3 | GAS (not IRF1) |

[0987] To construct a synthetic GAS containing promoter element, which is used in the Biological Assays described in Examples 27-28, a PCR based strategy is employed to generate a GAS-SV40 promoter sequence. The 5′ primer contains four tandem copies of the GAS binding site found in the IRF1 promoter and previously demonstrated to bind STATs upon induction with a range of cytokines (Rothman et al., Immunity 1:457-468 (1994).), although other GAS or ISRE elements can be used instead. The 5′ primer also contains 18 bp of sequence complementary to the SV40 early promoter sequence and is flanked with an XhoI site. The sequence of the 5′ primer is:

(SEQ ID NO: 3)

5′:GCGCCTCGAGATTTCCCCGAAATCTAGATTTCCCCGAAATGATTTCC
CCGAAATGATTTCCCCGAAATATCTGCCATCTCAATTAG:3′

[0988] The downstream primer is complementary to the SV40 promoter and is flanked with a Hind III site:

| | |
|---|---|
| 5′:GCGGCAAGCTTTTTGCAAAGCCTAGGC:3′ | (SEQ ID NO: 4) |

[0989] PCR amplification is performed using the SV40 promoter template present in the B-gal:promoter plasmid obtained from CLONTECH™. The resulting PCR fragment is digested with XhoI/Hind III and subcloned into BLSK2-. (STRATAGENE™.) Sequencing with forward and reverse primers confirms that the insert contains the following sequence:

(SEQ ID NO: 5)

5′:CTCGAGATTTCCCCGAAATCTAGATTTCCCCGAAATGATTTCCCCGA
AATGATTTCCCCGAAATATCTGCCATCTCAATTAGTCAGCAACCATAGTC
CCGCCCCTAACTCCGCCCATCCCGCCCCTAACTCCGCCCAGTTCCGCCCA
TTCTCCGCCCCATGGCTGACTAATTTTTTTTATTTATGCAGAGGCCGAGG
CCCGCCTCGGCCTCTGAGCTATTCCAGAAGTAGTGAGGAGGCTTTTTTGG
AGGCCTAGGCTTTTGCAAAAAGCTT:3′

[0990] With this GAS promoter element linked to the SV40 promoter, a GAS:SEAP2 reporter construct is next engineered. Here, the reporter molecule is a secreted alkaline phosphatase, or “SEAP.” Clearly, however, any reporter molecule can be instead of SEAP, in this or in any of the other Examples. Well known reporter molecules that can be used instead of SEAP include chloramphenicol acetyltransferase (CAT), luciferase, alkaline phosphatase, B-galactosidase, green fluorescent protein (GFP), or any protein detectable by an antibody.

[0991] The above sequence confirmed synthetic GAS-SV40 promoter element is subcloned into the pSEAP-Promoter vector obtained from CLONTECH™ using HindIII and XhoI, effectively replacing the SV40 promoter with the amplified GAS:SV40 promoter element, to create the GAS-SEAP vector. However, this vector does not contain a neomycin resistance gene, and therefore, is not preferred for mammalian expression systems.

[0992] Thus, in order to generate mammalian stable cell lines expressing the GAS-SEAP reporter, the GAS-SEAP cassete is removed from the GAS-SEAP vector using SalI and NotI, and inserted into a backbone vector containing the neomycin resistance gene, such as pGFP-1 (CLONTECH™), using these restriction sites in the multiple cloning site, to create the GAS-SEAP/Neo vector. Once this vector is transfected into mammalian cells, this vector can then be used as a reporter molecule for GAS binding as described in Examples 27-28.

[0993] Other constructs can be made using the above description and replacing GAS with a different promoter sequence. For example, construction of reporter molecules containing EGR and NF-KB promoter sequences are described in Example 29. However, many other promoters can be substituted using the protocols described in this Example. For instance, SRE, IL-2, NFAT, or Osteocalcin promoters can be substituted, alone or in combination (e.g., GAS/NF-KB/EGR, GAS/NF-KB, II-2/NFAT, or NF-KB/GAS). Similarly, other cell lines can be used to test reporter construct activity, such as HELA (epithelial), HUVEC (endothelial), Reh (B-cell), Saos-2 (osteoblast), HUVAC (aortic), or Cardiomyocyte.

### Example 27

### High-Throughput Screening Assay for T-Cell Activity

[0994] The following protocol is used to assess T-cell activity by identifying factors, and determining whether supernate containing a polypeptide of the invention proliferates and/or differentiates T-cells. T-cell activity is assessed using the GAS/SEAP/Neo construct produced in Example 26. Thus, factors that increase SEAP activity indicate the ability to activate the Jaks-STATS signal transduction pathway. The T-cell used in this assay is Jurkat T-cells (ATCC™ Accession No. TIB-152), although Molt-3 cells (ATCC™ Accession No. CRL-1552) and Molt-4 cells (ATCC™ Accession No. CRL-1582) cells can also be used.

[0995] Jurkat T-cells are lymphoblastic CD4+ Thl helper cells. In order to generate stable cell lines, approximately 2 million Jurkat cells are transfected with the GAS-SEAP/neo vector using DMRIE-C (LIFE TECHNOLOGIES™)(transfection procedure described below). The transfected cells are seeded to a density of approximately 20,000 cells per well and transfectants resistant to 1 mg/ml genticin selected. Resistant colonies are expanded and then tested for their response to increasing concentrations of interferon gamma. The dose response of a selected clone is demonstrated.

[0996] Specifically, the following protocol will yield sufficient cells for 75 wells containing 200 μl of cells. Thus, it is either scaled up, or performed in multiple to generate sufficient cells for multiple 96 well plates. Jurkat cells are maintained in RPMI+10% serum with 1% Pen-Strep. Combine 2.5 mls of OPTI-MEM™ (LIFE TECHNOLOGIES™) with 10 μg of plasmid DNA in a T25 flask. Add 2.5 ml OPTI-MEM™ containing 50 μl of DMRIE-C and incubate at room temperature for 15-45 mins.

[0997] During the incubation period, count cell concentration, spin down the required number of cells (10⁷ per transfection), and resuspend in OPTI-MEM™ to a final concentration of 10⁷ cells/ml. Then add 1 ml of 1×10⁷ cells in OPTI-MEM™ to T25 flask and incubate at 37 degree C. for 6 hrs. After the incubation, add 10 ml of RPMI+15% serum.

[0998] The Jurkat:GAS-SEAP stable reporter lines are maintained in RPMI+10% serum, 1 mg/ml Genticin, and 1% Pen-Strep. These cells are treated with supernatants containing polypeptide of the present invention or polypeptide of the present invention induced polypeptides as produced by the protocol described in Example 25.

[0999] On the day of treatment with the supernatant, the cells should be washed and resuspended in fresh RPMI+10% serum to a density of 500,000 cells per ml. The exact number of cells required will depend on the number of supernatants being screened. For one 96 well plate, approximately 10 million cells (for 10 plates, 100 million cells) are required.

[1000] Transfer the cells to a triangular reservoir boat, in order to dispense the cells into a 96 well dish, using a 12 channel pipette. Using a 12 channel pipette, transfer 200 μl of cells into each well (therefore adding 100,000 cells per well).

[1001] After all the plates have been seeded, 50 μl of the supernatants are transferred directly from the 96 well plate containing the supernatants into each well using a 12 channel pipette. In addition, a dose of exogenous interferon gamma (0.1, 1.0, 10 ng) is added to wells H9, H10, and H11 to serve as additional positive controls for the assay.

[1002] The 96 well dishes containing Jurkat cells treated with supernatants are placed in an incubator for 48 hrs (note: this time is variable between 48-72 hrs). 35 μl samples from each well are then transferred to an opaque 96 well plate using a 12 channel pipette. The opaque plates should be covered (using sellophene covers) and stored at −20 degree C. until SEAP assays are performed according to Example 30. The plates containing the remaining treated cells are placed at 4 degree C. and serve as a source of material for repeating the assay on a specific well if desired.

[1003] As a positive control, 100 Unit/ml interferon gamma can be used which is known to activate Jurkat T cells. Over 30 fold induction is typically observed in the positive control wells.

[1004] The above protocol may be used in the generation of both transient, as well as, stable transfected cells, which would be apparent to those of skill in the art.

### Example 28

### High-Throughput Screening Assay Identifying Myeloid Activity

[1005] The following protocol is used to assess myeloid activity of polypeptide of the present invention by determining whether polypeptide of the present invention proliferates and/or differentiates myeloid cells. Myeloid cell activity is assessed using the GAS/SEAP/Neo construct produced in Example 26. Thus, factors that increase SEAP activity indicate the ability to activate the Jaks-STATS signal transduction pathway. The mycloid cell used in this assay is U937, a pre-monocyte cell line, although TF-1, HL60, or KG1 can be used.

[1006] To transiently transfect U937 cells with the GAS/SEAP/Neo construct produced in Example 26, a DEAE-Dextran method (Kharbanda et al., 1994, Cell Growth & Differentiation, 5:259-265) is used. First, harvest 2×10⁷ U937 cells and wash with PBS. The U937 cells are usually grown in RPMI 1640 medium containing 10% heat-inactivated fetal bovine serum (FBS) supplemented with 100 units/ml penicillin and 100 mg/ml streptomycin.

[1007] Next, suspend the cells in 1 ml of 20 mM Tris-HCl (pH 7.4) buffer containing 0.5 mg/ml DEAE-Dextran, 8 μg GAS-SEAP2 plasmid DNA, 140 mM NaCl, 5 mM KCl, 375 uM Na₂HPO₄.7H₂O, 1 mM MgCl₂, and 675 uM CaCl₂. Incubate at 37 degrees C. for 45 min.

[1008] Wash the cells with RPMI 1640 medium containing 10% FBS and then resuspend in 10 ml complete medium and incubate at 37 degree C. for 36 hr.

[1009] The GAS-SEAP/U937 stable cells are obtained by growing the cells in 400 μg/ml G418. The G418-free medium is used for routine growth but every one to two months, the cells should be re-grown in 400 μg/ml G418 for couple of passages.

[1010] These cells are tested by harvesting 1×10⁸ cells (this is enough for ten 96-well plates assay) and wash with PBS. Suspend the cells in 200 ml above described growth medium, with a final density of 5×10⁵ cells/ml. Plate 200 μl cells per well in the 96-well plate (or 1×10⁵ cells/well).

[1011] Add 50 μl of the supernatant prepared by the protocol described in Example 25. Incubate at 37 degee C. for 48 to 72 hr. As a positive control, 100 Unit/ml interferon gamma can be used which is known to activate U937 cells. Over 30 fold induction is typically observed in the positive control wells. SEAP assay the supernatant according to the protocol described in Example 30.

### Example 29

### High-Throughput Screening Assay for T-Cell Activity

[1012] NF-KB (Nuclear Factor KB) is a transcription factor activated by a wide variety of agents including the inflammatory cytokines IL-1 and TNF, CD30 and CD40, lymphotoxin-alpha and lymphotoxin-beta, by exposure to LPS or thrombin, and by expression of certain viral gene products. As a transcription factor, NF-KB regulates the expression of genes involved in immune cell activation, control of apoptosis (NF-KB appears to shield cells from apoptosis), B and T-cell development, anti-viral and antimicrobial responses, and multiple stress responses.

[1013] In non-stimulated conditions, NF-KB is retained in the cytoplasm with I-KB (Inhibitor KB). However, upon stimulation, I-KB is phosphorylated and degraded, causing NF-KB to shuttle to the nucleus, thereby activating transcription of target genes. Target genes activated by NF-KB include IL-2, IL-6, GM-CSF, ICAM-1 and class I MHC.

[1014] Due to its central role and ability to respond to a range of stimuli, reporter constructs utilizing the NF-KB promoter element are used to screen the supernatants produced in Example 25. Activators or inhibitors of NF-KB would be useful in detecting, preventing, diagnosing, prognosticating, treating, and/or ameliorating diseases. For example, inhibitors of NF-KB could be used to treat those diseases related to the acute or chronic activation of NF-KB, such as rheumatoid arthritis.

[1015] To construct a vector containing the NF-KB promoter element, a PCR based strategy is employed. The upstream primer contains four tandem copies of the NF-KB binding site (GGGGACTTTCCC) (SEQ ID NO: 8), 18 bp of sequence complementary to the 5′ end of the SV40 early promoter sequence, and is flanked with an XhoI site:

(SEQ ID NO: 9)
5′:GCGGCCTCGAGGGGACTTTCCCGGGGACTTTCCGGGGACTTTCCGGG
ACTTTCCATCCTGCCATCTCAATTAG:3′

[1016] The downstream primer is complementary to the 3′ end of the SV40 promoter and is flanked with a Hind III site:

| | |
|---|---|
| 5′:GCGGCAAGCTTTTTGCAAAGCCTAGGC:3′ | (SEQ ID NO: 4) |

[1017] PCR amplification is performed using the SV40 promoter template present in the pB-gal:promoter plasmid obtained from CLONTECH™. The resulting PCR fragment is digested with XhoI and Hind III and subcloned into BLSK2-. (STRATAGENE™) Sequencing with the T7 and T3 primers confirms the insert contains the following sequence:

(SEQ ID NO: 10)

5′:CTCGAGGGGACTTTCCCGGGGACTTTCCGGGGACTTTCCGGGACTTT
CCATCTGCCATCTCAATTAGTCAGCAACCATAGTCCCGCCCCTAACTCCG
CCCATCCCGCCCCTAACTCCGCCCAGTTCCGCCCATTCTCCGCCCCATGG
CTGACTAATTTTTTTTATTTATGCAGAGGCCGAGGCCGCCTCGGCCTCTG
AGCTATTCCAGAAGTAGTGAGGAGGCTTTTTTGGAGGCCTAGGCTTTTGC
AAAAAGCTT:3′

[1018] Next, replace the SV40 minimal promoter element present in the pSEAP2-promoter plasmid (CLONTECH™) with this NF-KB/SV40 fragment using XhoI and HindIII. However, this vector does not contain a neomycin resistance gene, and therefore, is not preferred for mammalian expression systems.

[1019] In order to generate stable mammalian cell lines, the NF-KB/SV40/SEAP cassette is removed from the above NF-KB/SEAP vector using restriction enzymes SalI and NotI, and inserted into a vector containing neomycin resistance. Particularly, the NF-KB/SV40/SEAP cassette was inserted into pGFP-1 (CLONTECH™), replacing the GFP gene, after restricting pGFP-1 with SalI and NotI.

[1020] Once NF-KB/SV40/SEAP/Neo vector is created, stable Jurkat T-cells are created and maintained according to the protocol described in Example 27. Similarly, the method for assaying supernatants with these stable Jurkat T-cells is also described in Example 27. As a positive control, exogenous TNF alpha (0.1, 1, 10 ng) is added to wells H9, H10, and H11, with a 5-10 fold activation typically observed.

### Example 30

### Assay for SEAP Activity

[1021] As a reporter molecule for the assays described in Examples 27-29, SEAP activity is assayed using the Tropix Phospho-light Kit (Cat. BP-400) according to the following general procedure. The Tropix Phospho-light Kit supplies the Dilution, Assay, and Reaction Buffers used below.

[1022] Prime a dispenser with the 2.5× Dilution Buffer and dispense 15 μl of 2.5× dilution buffer into Optiplates containing 35 μl of a supernatant. Seal the plates with a plastic sealer and incubate at 65 degree C. for 30 min. Separate the Optiplates to avoid uneven heating.

[1023] Cool the samples to room temperature for 15 minutes. Empty the dispenser and prime with the Assay Buffer. Add 50 ml Assay Buffer and incubate at room temperature 5 min. Empty the dispenser and prime with the Reaction Buffer (see the Table below). Add 50 μl Reaction Buffer and incubate at room temperature for 20 minutes. Since the intensity of the chemiluminescent signal is time dependent, and it takes about 10 minutes to read 5 plates on a luminometer, thus one should treat 5 plates at each time and start the second set 10 minutes later.

[1024] Read the relative light unit in the luminometer. Set H12 as blank, and print the results. An increase in chemiluminescence indicates reporter activity.

Reaction Buffer Formulation:

| # of plates | Rxn buffer diluent (ml) | CSPD (ml) |
|---|---|---|
| 10 | 60 | 3 |
| 11 | 65 | 3.25 |
| 12 | 70 | 3.5 |
| 13 | 75 | 3.75 |
| 14 | 80 | 4 |
| 15 | 85 | 4.25 |
| 16 | 90 | 4.5 |
| 17 | 95 | 4.75 |
| 18 | 100 | 5 |
| 19 | 105 | 5.25 |
| 20 | 110 | 5.5 |
| 21 | 115 | 5.75 |
| 22 | 120 | 6 |
| 23 | 125 | 6.25 |
| 24 | 130 | 6.5 |
| 25 | 135 | 6.75 |
| 26 | 140 | 7 |
| 27 | 145 | 7.25 |
| 28 | 150 | 7.5 |
| 29 | 155 | 7.75 |
| 30 | 160 | 8 |
| 31 | 165 | 8.25 |
| 32 | 170 | 8.5 |
| 33 | 175 | 8.75 |
| 34 | 180 | 9 |
| 35 | 185 | 9.25 |
| 36 | 190 | 9.5 |
| 37 | 195 | 9.75 |
| 38 | 200 | 10 |
| 39 | 205 | 10.25 |
| 40 | 210 | 10.5 |
| 41 | 215 | 10.75 |
| 42 | 220 | 11 |
| 43 | 225 | 11.25 |
| 44 | 230 | 11.5 |
| 45 | 235 | 11.75 |
| 46 | 240 | 12 |
| 47 | 245 | 12.25 |
| 48 | 250 | 12.5 |
| 49 | 255 | 12.75 |
| 50 | 260 | 13 |

### Example 31

### High-Throughput Screening Assay Identifying Changes in Small Molecule Concentration and Membrane Permeability

[1025] Binding of a ligand to a receptor is known to alter intracellular levels of small molecules, such as calcium, potassium, sodium, and pH, as well as alter membrane potential. These alterations can be measured in an assay to identify supernatants which bind to receptors of a particular cell. Although the following protocol describes an assay for calcium, this protocol can easily be modified to detect changes in potassium, sodium, pH, membrane potential, or any other small molecule which is detectable by a fluorescent probe.

[1026] The following assay uses Fluorometric Imaging Plate Reader (“FLIPR”) to measure changes in fluorescent molecules (Molecular Probes) that bind small molecules. Clearly, any fluorescent molecule detecting a small molecule can be used instead of the calcium fluorescent molecule, fluo-4 (Molecular Probes, Inc.; catalog no. F-14202), used here.

[1027] For adherent cells, seed the cells at 10,000-20,000 cells/well in a Co-star black 96-well plate with clear bottom. The plate is incubated in a CO₂ incubator for 20 hours. The adherent cells are washed two times in Biotek washer with 200 μl of HBSS (Hank's Balanced Salt Solution) leaving 100 μl of buffer after the final wash.

[1028] A stock solution of 1 mg/ml fluo-4 is made in 10% pluronic acid DMSO. To load the cells with fluo-4, 50 μl of 12 μg/ml fluo-4 is added to each well. The plate is incubated at 37 degrees C. in a CO₂ incubator for 60 min. The plate is washed four times in the Biotek washer with HBSS leaving 100 μl of buffer.

[1029] For non-adherent cells, the cells are spun down from culture media. Cells are re-suspended to 2-5×10⁶ cells/ml with HBSS in a 50-ml conical tube. 4 μl of 1 mg/ml fluo-4 solution in 10% pluronic acid DMSO is added to each ml of cell suspension. The tube is then placed in a 37 degrees C. water bath for 30-60 min. The cells are washed twice with HBSS, resuspended to 1×10⁶ cells/ml, and dispensed into a microplate, 100 μl/well. The plate is centrifuged at 1000 rpm for 5 min. The plate is then washed once in Denley Cell Wash with 200 μl, followed by an aspiration step to 100 μl final volume.

[1030] For a non-cell based assay, each well contains a fluorescent molecule, such as fluo-4. The supernatant is added to the well, and a change in fluorescence is detected.

[1031] To measure the fluorescence of intracellular calcium, the FLIPR is set for the following parameters: (1) System gain is 300-800 mW; (2) Exposure time is 0.4 second; (3) Camera F/stop is F/2; (4) Excitation is 488 nm; (5) Emission is 530 nm; and (6) Sample addition is 50 μl. Increased emission at 530 nm indicates an extracellular signaling event caused by the a molecule, either polypeptide of the present invention or a molecule induced by polypeptide of the present invention, which has resulted in an increase in the intracellular Ca⁺⁺ concentration.

### Example 32

### High-Throughput Screening Assay Identifying Tyrosine Kinase Activity

[1032] The Protein Tyrosine Kinases (PTK) represent a diverse group of transmembrane and cytoplasmic kinases. Within the Receptor Protein Tyrosine Kinase RPTK) group are receptors for a range of mitogenic and metabolic growth factors including the PDGF, FGF, EGF, NGF, HGF and Insulin receptor subfamilies. In addition there are a large family of RPTKs for which the corresponding ligand is unknown. Ligands for RPTKs include mainly secreted small proteins, but also membrane-bound and extracellular matrix proteins.

[1033] Activation of RPTK by ligands involves ligand-mediated receptor dimerization, resulting in transphosphorylation of the receptor subunits and activation of the cytoplasmic tyrosine kinases. The cytoplasmic tyrosine kinases include receptor associated tyrosine kinases of the src-family (e.g., src, yes, lck, lyn, fyn) and non-receptor linked and cytosolic protein tyrosine kinases, such as the Jak family, members of which mediate signal transduction triggered by the cytokine superfamily of receptors (e.g., the Interleukins, Interferons, GM-CSF, and Leptin).

[1034] Because of the wide range of known factors capable of stimulating tyrosine kinase activity, identifying whether polypeptide of the present invention or a molecule induced by polypeptide of the present invention is capable of activating tyrosine kinase signal transduction pathways is of interest. Therefore, the following protocol is designed to identify such molecules capable of activating the tyrosine kinase signal transduction pathways.

[1035] Seed target cell (e.g., primary keratinocytes) at a density of approximately 25,000 cells per well in a 96 well LOPRODYNE™ Silent Screen Plates purchased from Nalge Nunc (Naperville, Ill.). The plates are sterilized with two 30 minute rinses with 100% ethanol, rinsed with water and dried overnight. Some plates are coated for 2 hr with 100 ml of cell culture grade type I collagen (50 mg/ml), gelatin (2%) or polylysine (50 mg/ml), all of which can be purchased from Sigma Chemicals (St. Louis, Mo.) or 10% MATRIGEL™ purchased from Becton Dickinson (Bedford, Mass.), or calf serum, rinsed with PBS and stored at 4 degree C. Cell growth on these plates is assayed by seeding 5,000 cells/well in growth medium and indirect quantitation of cell number through use of ALAMAR BLUE™ as described by the manufacturer Alamar Biosciences, Inc. (Sacramento, Calif.) after 48 hr. Falcon plate covers #3071 from Becton Dickinson (Bedford, Mass.) are used to cover the LOPRODYNE™ Silent Screen Plates. Falcon Microtest III cell culture plates can also be used in some proliferation experiments.

[1036] To prepare extracts, A431 cells are seeded onto the nylon membranes of LOPRODYNE™ plates (20,000/200 ml/well) and cultured overnight in complete medium. Cells are quiesced by incubation in serum-free basal medium for 24 hr. After 5-20 minutes treatment with EGF (60 ng/ml) or 50 μl of the supernatant produced in Example 25, the medium was removed and 100 ml of extraction buffer ((20 mM HEPES pH 7.5, 0.15 M NaCl, 1% Triton X-100, 0.1% SDS, 2 mM Na3VO4, 2 mM Na4P207 and a cocktail of protease inhibitors (# 1836170) obtained from Boeheringer Mannheim (Indianapolis, Ind.)) is added to each well and the plate is shaken on a rotating shaker for 5 minutes at 4° C. The plate is then placed in a vacuum transfer manifold and the extract filtered through the 0.45 mm membrane bottoms of each well using house vacuum. Extracts are collected in a 96-well catch/assay plate in the bottom of the vacuum manifold and immediately placed on ice. To obtain extracts clarified by centrifugation, the content of each well, after detergent solubilization for 5 minutes, is removed and centrifuged for 15 minutes at 4 degree C. at 16,000×g.

[1037] Test the filtered extracts for levels of tyrosine kinase activity. Although many methods of detecting tyrosine kinase activity are known, one method is described here.

[1038] Generally, the tyrosine kinase activity of a supernatant is evaluated by determining its ability to phosphorylate a tyrosine residue on a specific substrate (a biotinylated peptide). Biotinylated peptides that can be used for this purpose include PSK1 (corresponding to amino acids 6-20 of the cell division kinase cdc2-p34) and PSK2 (corresponding to amino acids 1-17 of gastrin). Both peptides are substrates for a range of tyrosine kinases and are available from Boehringer Mannheim.

[1039] The tyrosine kinase reaction is set up by adding the following components in order. First, add 10 μl of 5 uM Biotinylated Peptide, then 10 μl ATP/Mg₂₊ (5 mM ATP/50 mM MgCl₂), then 10 μl of 5× Assay Buffer (40 mM imidazole hydrochloride, pH7.3, 40 mM beta-glycerophosphate, 1 mM EGTA, 100 mM MgCl₂, 5 mM MnCl₂, 0.5 mg/ml BSA), then 5 μl of Sodium Vanadate(1 mM), and then 5 μl of water. Mix the components gently and preincubate the reaction mix at 30 degree C. for 2 min. Initial the reaction by adding 10 μl of the control enzyme or the filtered supernatant.

[1040] The tyrosine kinase assay reaction is then terminated by adding 10 μl of 120 mm EDTA and place the reactions on ice.

[1041] Tyrosine kinase activity is determined by transferring 50 μl aliquot of reaction mixture to a microtiter plate (MTP) module and incubating at 37 degree C. for 20 min. This allows the streptavidin coated 96 well plate to associate with the biotinylated peptide. Wash the MTP module with 300 μl/well of PBS four times. Next add 75 μl of anti-phospotyrosine antibody conjugated to horse radish peroxidase(anti-P-Tyr-POD(0.5 u/ml)) to each well and incubate at 37 degree C. for one hour. Wash the well as above.

[1042] Next add 100 μl of peroxidase substrate solution (Boehringer Mannheim) and incubate at room temperature for at least 5 mins (up to 30 min). Measure the absorbance of the sample at 405 nm by using ELISA reader. The level of bound peroxidase activity is quantitated using an ELISA reader and reflects the level of tyrosine kinase activity.

### Example 33

### High-Throughput Screening Assay Identifying Phosphorylation Activity

[1043] As a potential alternative and/or complement to the assay of protein tyrosine kinase activity described in Example 32, an assay which detects activation (phosphorylation) of major intracellular signal transduction intermediates can also be used. For example, as described below one particular assay can detect tyrosine phosphorylation of the Erk-1 and Erk-2 kinases. However, phosphorylation of other molecules, such as Raf, JNK, p38 MAP, Map kinase kinase (MEK), MEK kinase, Src, Muscle specific kinase (MuSK), IRAK Tec, and Janus, as well as any other phosphoserine, phosphotyrosine, or phosphothreonine molecule, can be detected by substituting these molecules for Erk-1 or Erk-2 in the following assay.

[1044] Specifically, assay plates are made by coating the wells of a 96-well ELISA plate with 0.1 ml of protein G (1 μg/ml) for 2 hr at room temp, (RT). The plates are then rinsed with PBS and blocked with 3% BSA/PBS for 1 hr at RT. The protein G plates are then treated with 2 commercial monoclonal antibodies (10 ng/well) against Erk-1 and Erk-2 (1 hr at RT) (Santa Cruz Biotechnology). (To detect other molecules, this step can easily be modified by substituting a monoclonal antibody detecting any of the above described molecules.) After 3-5 rinses with PBS, the plates are stored at 4 degree C. until use.

[1045] A431 cells are seeded at 20,000/well in a 96-well LOPRODYNE™ filterplate and cultured overnight in growth medium. The cells are then starved for 48 hr in basal medium (DMEM) and then treated with EGF (6 ng/well) or 50 μl of the supernatants obtained in Example 25 for 5-20 minutes. The cells are then solubilized and extracts filtered directly into the assay plate.

[1046] After incubation with the extract for 1 hr at RT, the wells are again rinsed. As a positive control, a commercial preparation of MAP kinase (10 ng/well) is used in place of A431 extract. Plates are then treated with a commercial polyclonal (rabbit) antibody (1 μg/ml) which specifically recognizes the phosphorylated epitope of the Erk-1 and Erk-2 kinases (1 hr at RT). This antibody is biotinylated by standard procedures. The bound polyclonal antibody is then quantitated by successive incubations with Europium-streptavidin and Europium fluorescence enhancing reagent in the Wallac DELFIA instrument (time-resolved fluorescence). An increased fluorescent signal over background indicates a phosphorylation by polypeptide of the present invention or a molecule induced by polypeptide of the present invention.

### Example 34

### Assay for the Stimulation of Bone Marrow CD34+ Cell Proliferation

[1047] This assay is based on the ability of human CD34+ to proliferate in the presence of hematopoietic growth factors and evaluates the ability of isolated polypeptides expressed in mammalian cells to stimulate proliferation of CD34+cells.

[1048] It has been previously shown that most mature precursors will respond to only a single signal. More immature precursors require at least two signals to respond. Therefore, to test the effect of polypeptides on hematopoietic activity of a wide range of progenitor cells, the assay contains a given polypeptide in the presence or absence of other hematopoietic growth factors. Isolated cells are cultured for 5 days in the presence of Stem Cell Factor (SCF) in combination with tested sample. SCF alone has a very limited effect on the proliferation of bone marrow (BM) cells, acting in such conditions only as a “survival” factor. However, combined with any factor exhibiting stimulatory effect on these cells (e.g., IL-3), SCF will cause a synergistic effect. Therefore, if the tested polypeptide has a stimulatory effect on hematopoietic progenitors, such activity can be easily detected. Since normal BM cells have a low level of cycling cells, it is likely that any inhibitory effect of a given polypeptide, or agonists or antagonists thereof, might not be detected. Accordingly, assays for an inhibitory effect on progenitors is preferably tested in cells that are first subjected to in vitro stimulation with SCF+IL+3, and then contacted with the compound that is being evaluated for inhibition of such induced proliferation.

[1049] Briefly, CD34+cells are isolated using methods known in the art. The cells are thawed and resuspended in medium (QBSF 60 serum-free medium with 1% L-glutamine (500 ml) Quality Biological, Inc., Gaithersburg, Md. Cat# 160-204-101). After several gentle centrifugation steps at 200×g, cells are allowed to rest for one hour. The cell count is adjusted to 2.5×10⁵ cells/ml. During this time, 100 μl of sterile water is added to the peripheral wells of a 96-well plate. The cytokines that can be tested with a given polypeptide in this assay is rhSCF (R&D Systems, Minneapolis, Minn., Cat# 255-SC) at 50 ng/ml alone and in combination with rhSCF and rhIL-3 (R&D Systems, Minneapolis, Minn., Cat# 203-ML) at 30 ng/ml. After one hour, 10 μl of prepared cytokines, 50 μl of the supernatants prepared in Example 25 (supernatants at 1:2 dilution=50 μl) and 20 μl of diluted cells are added to the media which is already present in the wells to allow for a final total volume of 100 μl. The plates are then placed in a 37° C./5% CO₂ incubator for five days.

[1050] Eighteen hours before the assay is harvested, 0.5 μCi/well of [3H] Thymidine is added in a 10 μl volume to each well to determine the proliferation rate. The experiment is terminated by harvesting the cells from each 96-well plate to a filtermat using the Tomtec Harvester 96. After harvesting, the filtermats are dried, trimmed and placed into OMNIFILTER™ assemblies consisting of one OMNIFILTER™ plate and one OMNIFILTER™ Tray. 60 μl MICROSCINT™ is added to each well and the plate sealed with TopSeal-A press-on sealing film A bar code 15 sticker is affixed to the first plate for counting. The sealed plates are then loaded and the level of radioactivity determined via the Packard Top Count and the printed data collected for analysis. The level of radioactivity reflects the amount of cell proliferation.

[1051] The studies described in this example test the activity of a given polypeptide to stimulate bone marrow CD34+ cell proliferation. One skilled in the art could easily modify the exemplified studies to test the activity of polynucleotides (e.g., gene therapy), antibodies, agonists, and/or antagonists and fragments and variants thereof. As a nonlimiting example, potential antagonists tested in this assay would be expected to inhibit cell proliferation in the presence of cytokines and/or to increase the inhibition of cell proliferation in the presence of cytokines and a given polypeptide. In contrast, potential agonists tested in this assay would be expected to enhance cell proliferation and/or to decrease the inhibition of cell proliferation in the presence of cytokines and a given polypeptide.

[1052] The ability of a gene to stimulate the proliferation of bone marrow CD34+ cells indicates that polynucleotides and polypeptides corresponding to the gene are useful for the detection, prevention, diagnosis, prognostication, treatment, and/or amelioration of disorders affecting the immune system and hematopoiesis. Representative uses are described in the “Immune Activity” and “Infectious Disease” sections above, and elsewhere herein.

### Example 35

### Cellular Adhesion Molecule (CAM) Expression on Endothelial Cells

[1053] The recruitment of lymphocytes to areas of inflammation and angiogenesis involves specific receptor-ligand interactions between cell surface adhesion molecules (CAMs) on lymphocytes and the vascular endothelium. The adhesion process, in both normal and pathological settings, follows a multi-step cascade that involves intercellular adhesion molecule-1 (ICAM-1), vascular cell adhesion molecule-1 (VCAM-1), and endothelial leukocyte adhesion molecule-1 (E-selectin) expression on endothelial cells (EC). The expression of these molecules and others on the vascular endothelium determines the efficiency with which leukocytes may adhere to the local vasculature and extravasate into the local tissue during the development of an inflammatory response. The local concentration of cytokines and growth factor participate in the modulation of the expression of these CAMs.

[1054] Briefly, endothelial cells (e.g., Human Umbilical Vein Endothelial cells (HUVECs)) are grown in a standard 96 well plate to confluence, growth medium is removed from the cells and replaced with 100 μl of 199 Medium (10% fetal bovine serum (FBS)). Samples for testing and positive or negative controls are added to the plate in triplicate (in 10 μl volumes). Plates are then incubated at 37° C. for either 5 h (selectin and integrin expression) or 24 h (integrin expression only). Plates are aspirated to remove medium and 100 μl of 0.1% paraformaldehyde-PBS(with Ca++ and Mg++) is added to each well. Plates are held at 4° C. for 30 min. Fixative is removed from the wells and wells are washed 1× with PBS(+Ca,Mg)+0.5% BSA and drained. 10 μl of diluted primary antibody is added to the test and control wells. Anti-ICAM-1-Biotin, Anti-VCAM-1-Biotin and Anti-E-selectin-Biotin are used at a concentration of 10 μg/ml (1:10 dilution of 0.1 mg/ml stock antibody). Cells are incubated at 37° C. for 30 min. in a humidified environment. Wells are washed three times with PBS(+Ca,Mg)+0.5% BSA. 20 μl of diluted ExtrAvidin-Alkaline Phosphatase (1:5,000 dilution, referred to herein as the working dilution) are added to each well and incubated at 37° C. for 30 min. Wells are washed three times with PBS(+Ca,Mg)+0.5% BSA. Dissolve 1 tablet of p-Nitrophenol Phosphate pNPP per 5 ml of glycine buffer (pH 10.4). 100 μl of pNPP substrate in glycine buffer is added to each test well. Standard wells in triplicate are prepared from the working dilution of the ExtrAvidin-Alkaline Phosphotase in glycine buffer: 1:5,000 (10⁰)>10^{-0.5}>10⁻¹>10^{-1.5}. 5 μl of each dilution is added to triplicate wells and the resulting AP content in each well is 5.50 ng, 1.74 ng, 0.55 ng, 0.18 ng. 100 μl of pNNP reagent is then added to each of the standard wells. The plate is incubated at 37° C. for 4 h. A volume of 50 μl of 3M NaOH is added to all wells. The plate is read on a plate reader at 405 nm using the background subtraction option on blank wells filled with glycine buffer only. Additionally, the template is set up to indicate the concentration of AP-conjugate in each standard well [5.50 ng; 1.74 ng; 0.55 ng; 0.18 ng]. Results are indicated as amount of bound AP-conjugate in each sample.

### Example 36

### ALAMAR BLUE™ Endothelial Cells Proliferation Assay

[1055] This assay may be used to quantitatively determine protein mediated inhibition of bFGF-induced proliferation of Bovine Lymphatic Endothelial Cells (LECs), Bovine Aortic Endothelial Cells (BAECs) or Human Microvascular Uterine Myometrial Cells (UTMECs). This assay incorporates a fluorometric growth indicator based on detection of metabolic activity. A standard ALAMAR BLUE™ Proliferation Assay is prepared in EGM-2MV with 10 ng/ml of bFGF added as a source of endothelial cell stimulation. This assay may be used with a variety of endothelial cells with slight changes in growth medium and cell concentration. Dilutions of the protein batches to be tested are diluted as appropriate. Serum-free medium (GIBCO SFM) without bFGF is used as a non-stimulated control and Angiostatin or TSP-1 are included as a known inhibitory controls.

[1056] Briefly, LEC, BAECs or UTMECs are seeded in growth media at a density of 5000 to 2000 cells/well in a 96 well plate and placed at 37 degrees C. overnight. After the overnight incubation of the cells, the growth media is removed and replaced with GIBCO EC-SFM. The cells are treated with the appropriate dilutions of the protein of interest or control protein sample(s) (prepared in SFM) in triplicate wells with additional bFGF to a concentration of 10 ng/ml. Once the cells have been treated with the samples, the plate(s) is/are placed back in the 37° C. incubator for three days. After three days 10 ml of stock ALAMAR BLUE™ (Biosource Cat# DAL1100) is added to each well and the plate(s) is/are placed back in the 37° C. incubator for four hours. The plate(s) are then read at 530 nm excitation and 590 nm emission using the CYTOFLUOR™ fluorescence reader. Direct output is recorded in relative fluorescence units.

[1057] ALAMAR BLUE™ is an oxidation-reduction indicator that both fluoresces and changes color in response to chemical reduction of growth medium resulting from cell growth. As cells grow in culture, innate metabolic activity results in a chemical reduction of the immediate surrounding environment. Reduction related to growth causes the indicator to change from oxidized (non-fluorescent blue) form to reduced (fluorescent red) form (i.e., stimulated proliferation will produce a stronger signal and inhibited proliferation will produce a weaker signal and the total signal is proportional to the total number of cells as well as their metabolic activity). The background level of activity is observed with the starvation medium alone. This is compared to the output observed from the positive control samples (bFGF in growth medium) and protein dilutions.

### Example 37

### Detection of Inhibition of a Mixed Lymphocyte Reaction

[1058] This assay can be used to detect and evaluate inhibition of a Mixed Lymphocyte Reaction (MLR) by gene products (e.g., isolated polypeptides). Inhibition of a MLR may be due to a direct effect on cell proliferation and viability, modulation of costimulatory molecules on interacting cells, modulation of adhesiveness between lymphocytes and accessory cells, or modulation of cytokine production by accessory cells. Multiple cells may be targeted by these polypeptides since the peripheral blood mononuclear fraction used in this assay includes T, B and natural killer lymphocytes, as well as monocytes and dendritic cells.

[1059] Polypeptides of interest found to inhibit the MLR may find application in diseases associated with lymphocyte and monocyte activation or proliferation. These include, but are not limited to, diseases such as asthma, arthritis, diabetes, inflammatory skin conditions, psoriasis, eczema, systemic lupus erythematosus, multiple sclerosis, glomerulonephritis, inflammatory bowel disease, crohn's disease, ulcerative colitis, arteriosclerosis, cirrhosis, graft vs. host disease, host vs. graft disease, hepatitis, leukemia and lymphoma.

[1060] Briefly, PBMCs from human donors are purified by density gradient centrifugation using Lymphocyte Separation Medium (LSM®, density 1.0770 g/ml, Organon Teknika Corporation, West Chester, Pa.). PBMCs from two donors are adjusted to 2×10⁶ cells/ml in RPMI-1640 (Life Technologies, Grand Island, N.Y.) supplemented with 10% FCS and 2 mM glutamine. PBMCs from a third donor is adjusted to 2×10⁵ cells/ml. Fifty microliters of PBMCs from each donor is added to wells of a 96-well round bottom microtiter plate. Dilutions of test materials (50 μl) is added in triplicate to microtiter wells. Test samples (of the protein of interest) are added for final dilution of 1:4; rhuIL-2 (R&D Systems, Minneapolis, Minn., catalog number 202-IL) is added to a final concentration of 1 μg/ml; anti-CD4 mAb (R&D Systems, clone 34930.11, catalog number MAB379) is added to a final concentration of 10 μg/ml. Cells are cultured for 7-8 days at 37° C. in 5% CO₂, and 1 μC of [³H] thymidine is added to wells for the last 16 hrs of culture. Cells are harvested and thymidine incorporation determined using a Packard TopCount. Data is expressed as the mean and standard deviation of triplicate determinations.

[1061] Samples of the protein of interest are screened in separate experiments and compared to the negative control treatment, anti-CD4 mAb, which inhibits proliferation of lymphocytes and the positive control treatment, IL-2 (either as recombinant material or supernatant), which enhances proliferation of lymphocytes.

[1062] One skilled in the art could easily modify the exemplified studies to test the activity of polynucleotides (e.g., gene therapy), antibodies, agonists, and/or antagonists and fragments and variants thereof.

### Example 38

### Assays for Protease Activity

[1063] The following assay may be used to assess protease activity of the polypeptides of the invention.

[1064] Gelatin and casein zymography are performed essentially as described (Heusen et al., Anal. Biochem., 102:196-202 (1980); Wilson et al., Journal of Urology, 149:653-658 (1993)). Samples are run on 10% polyacryamide/0.1% SDS gels containing 1% gelain orcasein, soaked in 2.5% triton at room temperature for 1 hour, and in 0.1M glycine, pH 8.3 at 37° C. 5 to 16 hours. After staining in amido black areas of proteolysis apear as clear areas agains the blue-black background. Trypsin (SIGMA™ T8642) is used as a positive control.

[1065] Protease activity is also determined by monitoring the cleavage of n-a-benzoyl-L-arginine ethyl ester (BAEE) (Sigma B-4500. Reactions are set up in (25 mM NaPO₄,1 mM EDTA, and 1 mM BAEE), pH 7.5. Samples are added and the change in adsorbance at 260 nm is monitored on the Beckman DU-6 spectrophotometer in the time-drive mode. Trypsin is used as a positive control.

[1066] Additional assays based upon the release of acid-soluble peptides from casein or hemoglobin measured as adsorbance at 280 nm or colorimetrically using the Folin method are performed as described in Bergmeyer, et al., Methods of Enzymatic Analysis, 5 (1984). Other assays involve the solubilization of chromogenic substrates (Ward, Applied Science, 251-317 (1983)).

### Example 39

### Identifying Serine Protease Substrate Specificity

[1067] Methods known in the art or described herein may be used to determine the substrate specificity of the polypeptides of the present invention having serine protease activity. A preferred method of determining substrate specificity is by the use of positional scanning synthetic combinatorial libraries as described in GB 2 324 529 (incorporated herein in its entirety).

### Example 40

### Ligand Binding Assays

[1068] The following assay may be used to assess ligand binding activity of the polypeptides of the invention.

[1069] Ligand binding assays provide a direct method for ascertaining receptor pharmacology and are adaptable to a high throughput format. The purified ligand for a polypeptide is radiolabeled to high specific activity (50-2000 Ci/mmol) for binding studies. A determination is then made that the process of radiolabeling does not diminish the activity of the ligand towards its polypeptide. Assay conditions for buffers, ions, pH and other modulators such as nucleotides are optimized to establish a workable signal to noise ratio for both membrane and whole cell polypeptide sources. For these assays, specific polypeptide binding is defined as total associated radioactivity minus the radioactivity measured in the presence of an excess of unlabeled competing ligand. Where possible, more than one competing ligand is used to define residual nonspecific binding.

### Example 41

### Functional Assay in Xenopus Oocytes

[1070] Capped RNA transcripts from linearized plasmid templates encoding the polypeptides of the invention are synthesized in vitro with RNA polymerases in accordance with standard procedures. In vitro transcripts are suspended in water at a final concentration of 0.2 mg/ml. Ovarian lobes are removed from adult female toads, Stage V defolliculated oocytes are obtained, and RNA transcripts (10 ng/oocytc) are injected in a 50 nl bolus using a microinjection apparatus. Two electrode voltage clamps are used to measure the currents from individual Xenopus oocytes in response polypeptides and polypeptide agonist exposure. Recordings are made in Ca2+ free Barth's medium at room temperature. The Xenopus system can be used to screen known ligands and tissue/cell extracts for activating ligands.

### Example 42

### Microphysiometric Assays

[1071] Activation of a wide variety of secondary messenger systems results in extrusion of small amounts of acid from a cell. The acid formed is largely as a result of the increased metabolic activity required to fuel the intracellular signaling process. The pH changes in the media surrounding the cell are very small but are detectable by the CYTOSENSOR microphysiometer (Molecular Devices Ltd., Menlo Park, Calif.). The CYTOSENSOR is thus capable of detecting the activation of polypeptide which is coupled to an energy utilizing intracellular signaling pathway.

### Example 43

### Extract/Cell Supernatant Screening

[1072] A large number of mammalian receptors exist for which there remains, as yet, no cognate activating ligand (agonist). Thus, active ligands for these receptors may not be included within the ligands banks as identified to date. Accordingly, the polypeptides of the invention can also be functionally screened (using calcium, cAMP, microphysiometer, oocyte electrophysiology, etc., functional screens) against tissue extracts to identify its natural ligands. Extracts that produce positive functional responses can be sequentially subfractionated until an activating ligand is isolated and identified.

### Example 44

### Calcium and CAMP Functional Assays

[1073] Seven transmembrane receptors which are expressed in HEK 293 cells have been shown to be coupled functionally to activation of PLC and calcium mobilization and/or cAMP stimulation or inhibition. Basal calcium levels in the HEK 293 cells in receptor-transfected or vector control cells were observed to be in the normal, 100 nM to 200 nM, range. HEK 293 cells expressing recombinant receptors are loaded with fura 2 and in a single day >150 selected ligands or tissue/cell extracts are evaluated for agonist induced calcium mobilization. Similarly, HEK 293 cells expressing recombinant receptors are evaluated for the stimulation or inhibition of cAMP production using standard cAMP quantitation assays. Agonists presenting a calcium transient or cAMP fluctuation are tested in vector control cells to determine if the response is unique to the transfected cells expressing receptor.

### Example 45

### ATP-Binding Assay

[1074] The following assay may be used to assess ATP-binding activity of polypeptides of the invention.

[1075] ATP-binding activity of the polypeptides of the invention may be detected using the ATP-binding assay described in U.S. Pat. No. 5,858,719, which is herein incorporated by reference in its entirety. Briefly, ATP-binding to polypeptides of the invention is measured via photoaffinity labeling with 8-azido-ATP in a competition assay. Reaction mixtures containing 1 mg/ml of the ABC transport protein of the present invention are incubated with varying concentrations of ATP, or the non-hydrolyzable ATP analog adenyl-5′-imidodiphosphate for 10 minutes at 4° C. A mixture of 8-azido-ATP (Sigma Chem. Corp., St. Louis, Mo.) plus 8-azido-ATP (³²P-ATP) (5 mCi/μmol, ICN, Irvine Calif.) is added to a final concentration of 100 μM and 0.5 ml aliquots are placed in the wells of a porcelain spot plate on ice. The plate is irradiated using a short wave 254 nm UV lamp at a distance of 2.5 cm from the plate for two one-minute intervals with a one-minute cooling interval in between. The reaction is stopped by addition of dithiothreitol to a final concentration of 2 mM. The incubations are subjected to SDS-PAGE electrophoresis, dried, and autoradiographed. Protein bands corresponding to the particular polypeptides of the invention are excised, and the radioactivity quantified. A decrease in radioactivity with increasing ATP or adenly-5′-imidodiphosphate provides a measure of ATP affinity to the polypeptides.

### Example 46

### Small Molecule Screening

[1076] This invention is particularly useful for screening therapeutic compounds by using the polypeptides of the invention, or binding fragments thereof, in any of a variety of drug screening techniques. The polypeptide or fragment employed in such a test may be affixed to a solid support, expressed on a cell surface, free in solution, or located intracellularly. One method of drug screening utilizes eukaryotic or prokaryotic host cells which are stably transformed with recombinant nucleic acids expressing the polypeptide or fragment. Drugs are screened against such transformed cells in competitive binding assays. One may measure, for example, the formulation of complexes between the agent being tested and polypeptide of the invention.

[1077] Thus, the present invention provides methods of screening for drugs or any other agents which affect activities mediated by the polypeptides of the invention. These methods comprise contacting such an agent with a polypeptide of the invention or fragment thereof and assaying for the presence of a complex between the agent and the polypeptide or fragment thereof, by methods well known in the art. In such a competitive binding assay, the agents to screen are typically labeled. Following incubation, free agent is separated from that present in bound form, and the amount of free or uncomplexed label is a measure of the ability of a particular agent to bind to the polypeptides of the invention.

[1078] Another technique for drug screening provides high throughput screening for compounds having suitable binding affinity to the polypeptides of the invention, and is described in great detail in European Patent Application 84/03564, published on Sep. 13, 1984, which is herein incorporated by reference in its entirety. Briefly stated, large numbers of different small molecule test compounds are synthesized on a solid substrate, such as plastic pins or some other surface. The test compounds are reacted with polypeptides of the invention and washed. Bound polypeptides are then detected by methods well known in the art. Purified polypeptides are coated directly onto plates for use in the aforementioned drug screening techniques. In addition, non-neutralizing antibodies may be used to capture the peptide and immobilize it on the solid support.

[1079] This invention also contemplates the use of competitive drug screening assays in which neutralizing antibodies capable of binding polypeptides of the invention specifically compete with a test compound for binding to the polypeptides or fragments thereof. In this manner, the antibodies are used to detect the presence of any peptide which shares one or more antigenic epitopes with a polypeptide of the invention.

### Example 47

### Phosphorylation Assay

[1080] In order to assay for phosphorylation activity of the polypeptides of the invention, a phosphorylation assay as described in U.S. Pat. No. 5,958,405 (which is herein incorporated by reference) is utilized. Briefly, phosphorylation activity may be measured by phosphorylation of a protein substrate using gamma-labeled ³²P-ATP and quantitation of the incorporated radioactivity using a gamma radioisotope counter. The polypeptides of the invention are incubated with the protein substrate, ³²P-ATP, and a kinase buffer. The ³²P incorporated into the substrate is then separated from free ³²P-ATP by electrophoresis, and the incorporated ³²P is counted and compared to a negative control. Radioactivity counts above the negative control are indicative of phosphorylation activity of the polypeptides of the invention.

### Example 48

### Detection of Phosphorylation Activity (Activation) of the Polypeptides of the Invention in the Presence of Polypeptide Ligands

[1081] Methods known in the art or described herein may be used to determine the phosphorylation activity of the polypeptides of the invention. A preferred method of determining phosphorylation activity is by the use of the tyrosine phosphorylation assay as described in U.S. Pat. No. 5,817,471 (incorporated herein by reference).

### Example 49

### Identification of Signal Transduction Proteins that Interact with Polypeptides of the Present Invention

[1082] The purified polypeptides of the invention are research tools for the identification, characterization and purification of additional signal transduction pathway proteins or receptor proteins. Briefly, labeled polypeptides of the invention are useful as reagents for the purification of molecules with which it interacts. In one embodiment of affinity purification, polypeptides of the invention are covalently coupled to a chromatography column. Cell-free extract derived from putative target cells, such as carcinoma tissues, is passed over the column, and molecules with appropriate affinity bind to the polypeptides of the invention. The protein complex is recovered from the column, dissociated, and the recovered molecule subjected to N-terminal protein sequencing. This amino acid sequence is then used to identify the captured molecule or to design degenerate oligonucleotide probes for cloning the relevant gene from an appropriate cDNA library.

### Example 50

### IL-6 Bioassay

[1083] To test the proliferative effects of the polypeptides of the invention, the IL-6 Bioassay as described by Marz et al is utilized (Proc. Natl. Acad. Sci., USA., 95:3251-56 (1998), which is herein incorporated by reference). Briefly, IL-6 dependent B9 murine cells are washed three times in IL-6 free medium and plated at a concentration of 5,000 cells per well in 50 μl, and 50 μl of the IL-6-like polypeptide is added. After 68 hrs. at 37° C., the number of viable cells is measured by adding the tetrazolium salt thiazolyl blue (MTT) and incubating for a further 4 hrs. at 37° C. B9 cells are lysed by SDS and optical density is measured at 570 nm. Controls containing IL-6 (positive) and no cytokine (negative) are utilized. Enhanced proliferation in the test sample(s) relative to the negative control is indicative of proliferative effects mediated by polypeptides of the invention.

### Example 51

### Assay for Phosphatase Activity

[1084] The following assay may be used to assess serine/threonine phosphatase (PTPase) activity of the polypeptides of the invention.

[1085] In order to assay for serine/threonine phosphatase (PTPase) activity, assays can be utilized which are widely known to those skilled in the art. For example, the serine/threonine phosphatase (PSPase) activity is measured using a PSPase assay kit from New England Biolabs, Inc. Myelin basic protein (MyBP), a substrate for PSPase, is phosphorylated on serine and threonine residues with cAMP-dependent Protein Kinase in the presence of [³²P]ATP. Protein serine/threonine phosphatase activity is then determined by measuring the release of inorganic phosphate from ³²P-labeled MyBP.

### Example 52

### Interaction of Serine/Threonine Phosphatases with Other Proteins

[1086] The polypeptides of the invention with serine/threonine phosphatase activity as determined in Example 51 are research tools for the identification, characterization and purification of additional interacting proteins or receptor proteins, or other signal transduction pathway proteins. Briefly, labeled polypeptide(s) of the invention is useful as a reagent for the purification of molecules with which it interacts. In one embodiment of affinity purification, polypeptide of the invention is covalently coupled to a chromatography column. Cell-free extract derived from putative target cells, such as neural or liver cells, is passed over the column, and molecules with appropriate affinity bind to the polypeptides of the invention. The polypeptides of the invention-complex is recovered from the column, dissociated, and the recovered molecule subjected to N-terminal protein sequencing. This amino acid sequence is then used to identify the captured molecule or to design degenerate oligonucleotide probes for cloning the relevant gene from an appropriate cDNA library.

### Example 53

### Assaying for Heparanase Activity

[1087] In order to assay for heparanase activity of the polypeptides of the invention, the heparanase assay described by Vlodavsky et al is utilized (Vlodavsky, I., et al., Nat. Med., 5:793-802 (1999)). Briefly, cell lysates, conditioned media or intact cells (1×10⁶ cells per 35-mm dish) are incubated for 18 hrs at 37° C., pH 6.2-6.6, with ³⁵S-labeled ECM or soluble ECM derived peak 1 proteoglycans. The incubation medium is centrifuged and the supernatant is analyzed by gel filtration on a Sepharose CL-6B column (0.9×30 cm). Fractions are eluted with PBS and their radioactivity is measured. Degradation fragments of heparan sulfate side chains are eluted from Sepharose 6B at 0.5<K. <0.8 (peak II). Each experiment is done at least three times. Degradation fragments corresponding to “peak II,” as described by Vlodavsky et al., is indicative of the activity of the polypeptides of the invention in cleaving heparan sulfate.

### Example 54

### Immobilization of Biomolecules

[1088] This example provides a method for the stabilization of polypeptides of the invention in non-host cell lipid bilayer constucts (see, e.g., Bieri et al., Nature Biotech 17:1105-1108 (1999), hereby incorporated by reference in its entirety herein) which can be adapted for the study of polypeptides of the invention in the various functional assays described above. Briefly, carbohydrate-specific chemistry for biotinylation is used to confine a biotin tag to the extracellular domain of the polypeptides of the invention, thus allowing uniform orientation upon immobilization. A 50 uM solution of polypeptides of the invention in washed membranes is incubated with 20 mM NaIO4 and 1.5 mg/ml (4 mM) BACH or 2 mg/ml (7.5 mM) biotin-hydrazide for 1 hr at room temperature (reaction volume, 150 μl). Then the sample is dialyzed (Pierce Slidealizer Cassett, 10 kDa cutoff; Pierce Chemical Co., Rockford Ill.) at 4C first for 5 h, exchanging the buffer after each hour, and finally for 12 h against 500 ml buffer R (0.15 M NaCl, 1 mM MgCl₂, 10 mM sodium phosphate, pH7). Just before addition into a cuvette, the sample is diluted 1:5 in buffer ROG50 (Buffer R supplemented with 50 mM octylglucoside).

### Example 55

### TAQMAN

[1089] Quantitative PCR (QPCR). Total RNA from cells in culture are extracted by Trizol separation as recommended by the supplier (LifeTechnologies). (Total RNA is treated with DNase 1 (LIFE TECHNOLOGIES™) to remove any contaminating genomic DNA before reverse transcription.) Total RNA (50 ng) is used in a one-step, 50 μl, RT-QPCR, consisting of Taqman Buffer A (Perkin-Elmer; 50 mM KCl/10 mM Tris, pH 8.3), 5.5 mM MgCl₂, 240 μM each dNTP, 0.4 units RNase inhibitor (PROMEGA™), 8% glycerol, 0.012% Tween-20, 0.05% gelatin, 0.3 uM primers, 0.1 uM probe, 0.025 units Amplitaq Gold (Perkin-Elmer) and 2.5 units Superscript II reverse transcriptase (LIFE TECHNOLOGIES™). As a control for genomic contamination, parallel reactions are setup without reverse transcriptase. The relative abundance of (unknown) and 18S RNAs are assessed by using the Applied Biosystems Prism 7700 Sequence Detection System (Livak, K. J., Flood, S. J., Marmaro, J., Giusti, W. & Deetz, K. (1995) PCR Methods Appl. 4, 357-362). Reactions are carried out at 48° C. for 30 min, 95° C. for 10 min, followed by 40 cycles of 95° C. for 15 s, 60° C. for 1 min. Reactions are performed in triplicate.

[1090] Primers (f & r) and FRET probes sets are designed using Primer Express Software (Perkin-Elmer). Probes are labeled at the 5′-end with the reporter dye 6-FAM and on the 3′-end with the quencher dye TAMRA (Biosource International, Camarillo, Calif. or Perkin-Elmer).

### Example 56

### Assays for Metalloproteinase Activity

[1091] Metalloproteinases (EC 3.4.24.-) are peptide hydrolases which use metal ions, such as Zn²⁺, as the catalytic mechanism. Metalloproteinase activity of polypeptides of the present invention can be assayed according to the following methods.

Proteolysis of alpha-2-macroglobulin

[1092] To confirm protease activity, purified polypeptides of the invention are mixed with the substrate alpha-2-macroglobulin (0.2 unit/ml; Boehringer Mannheim, Germany) in 1× assay buffer (50 mM HEPES, pH 7.5, 0.2 M NaCl, 10 mM CaCl₂, 25 μM ZnCl₂ and 0.05% Brij-35) and incubated at 37° C. for 1-5 days. Trypsin is used as positive control. Negative controls contain only alpha-2-macroglobulin in assay buffer. The samples are collected and boiled in SDS-PAGE sample buffer containing 5% 2-mercaptoethanol for 5-min, then loaded onto 8% SDS-polyacrylamide gel. After electrophoresis the proteins are visualized by silver staining. Proteolysis is evident by the appearance of lower molecular weight bands as compared to the negative control.

Inhibition of alpha-2-macroglobulin Proteolysis by Inhibitors of Metalloproteinases

[1093] Known metalloproteinase inhibitors (metal chelators (EDTA, EGTA, AND HgCl₂), peptide metalloproteinase inhibitors (TIMP-1 and TIMP-2), and commercial small molecule MMP inhibitors) are used to characterize the proteolytic activity of polypeptides of the invention. The three synthetic MMP inhibitors used are: MMP inhibitor I, [IC₅₀=1.0 μM against MMP-1 and MMP-8; IC₅₀=30 μM against MMP-9; IC₅₀=150 μM against MMP-3]; MMP-3 (stromelysin-1) inhibitor I [IC₅₀=5 μM against MMP-3], and MMP-3 inhibitor II [Kᵢ=130 nM against MMP-3]; inhibitors available through Calbiochem, catalog # 444250, 444218, and 444225, respectively). Briefly, different concentrations of the small molecule MMP inhibitors are mixed with purified polypeptides of the invention (50 μg/ml) in 22.9 μl of 1×HEPES buffer (50 mM HEPES, pH 7.5, 0.2 M NaCl, 10 mM CaCl₂, 25 μM ZnCl₂ and 0.05% Brij-35) and incubated at room temperature (24° C.) for 2-hr, then 7.1 μl of substrate alpha-2-macroglobulin (0.2 unit/ml) is added and incubated at 37° C. for 20-hr. The reactions are stopped by adding 4× sample buffer and boiled immediately for 5 minutes. After SDS-PAGE, the protein bands are visualized by silver stain.

Synthetic Fluorogenic Peptide Substrates Cleavage Assay

[1094] The substrate specificity for polypeptides of the invention with demonstrated metalloproteinase activity can be determined using synthetic fluorogenic peptide substrates (purchased from BACHEM Bioscience Inc). Test substrates include, M-1985, M-2225, M-2105, M-2110, and M-2255. The first four are MMP substrates and the last one is a substrate of tumor necrosis factor-α (TNF-α) converting enzyme (TACE). All the substrates are prepared in 1:1 dimethyl sulfoxide (DMSO) and water. The stock solutions are 50-500 μM. Fluorescent assays are performed by using a Perkin Elmer LS 50B luminescence spectrometer equipped with a constant temperature water bath. The excitation λ is 328 nm and the emission λ is 393 nm. Briefly, the assay is carried out by incubating 176 μl 1×HEPES buffer (0.2 M NaCl, 10 mM CaCl₂, 0.05% Brij-35 and 50 mM HEPES, pH 7.5) with 4 μl of substrate solution (50 μM) at 25° C. for 15 minutes, and then adding 20 μl of a purified polypeptide of the invention into the assay cuvett. The final concentration of substrate is 1 μM. Initial hydrolysis rates are monitored for 30-min.

### Example 57

### Characterization of the cDNA Contained in a Deposited Plasmid

[1095] The size of the cDNA insert contained in a deposited plasmid may be routinely determined using techniques known in the art, such as PCR amplification using synthetic primers hybridizable to the 3′ and 5′ ends of the cDNA sequence. For example, two primers of 17-30 nucleotides derived from each end of the cDNA (i.e., hybridizable to the absolute 5′ nucleotide or the 3′ nucleotide end of the sequence of SEQ ID NO:X, respectively) are synthesized and used to amplify the cDNA using the deposited cDNA plasmid as a template. The polymerase chain reaction is carried out under routine conditions, for instance, in 25 μl of reaction mixture with 0.5 μg of the above cDNA template. A convenient reaction mixture is 1.5-5 mM MgCl₂, 0.01% (w/v) gelatin, 20 uM each of dATP, dCTP, dGTP, dTTP, 25 pmol of each primer and 0.25 Unit of Taq polymerase. Thirty five cycles of PCR (denaturation at 94 degree C. for 1 min; annealing at 55 degree C. for 1 min; elongation at 72 degree C. for 1 min) are performed with a Perkin-Elmer Cetus automated thermal cycler. The amplified product is analyzed by agarose gel electrophoresis. The PCR product is verified to be the selected sequence by subcloning and sequencing the DNA product. It will be clear that the invention may be practiced otherwise than as particularly described in the foregoing description and examples. Numerous modifications and variations of the present invention are possible in light of the above teachings and, therefore, are within the scope of the appended claims.

### INCORPORATION BY REFERENCE

[1096] The entire disclosure of each document cited (including patents, patent applications, journal articles, abstracts, laboratory manuals, books, or other disclosures) in the Background of the Invention, Detailed Description, and Examples is hereby incorporated herein by reference. In addition, the sequence listing submitted herewith is incorporated herein by reference in its entirety. The specification and sequence listing of each of the following U.S. and PCT applications are herein incorporated by reference in their entirety: U.S. Appln. No. 60/040,162 filed on 07 Mar. 1997, U.S. Appln. No. 60/043,576 filed on 11 Apr. 1997, U.S. Appln. No. 60/047,601 filed on 23 May 1997, U.S. Appln. No. 60/056,845 filed on 22 Aug. 1997, U.S. Appln. No. 60/043,580 filed on 11 Apr. 1997, U.S. Appln. No. 60/047,599 filed on 23 May 1997, U.S. Appln. No. 60/056,664 filed on 22 Aug. 1997, U.S. Appln. No. 60/043,314 filed on 11 Apr. 1997, U.S. Appln. No. 60/047,632 filed on 23 May 1997, U.S. Appln. No. 60/056,892 filed on 22 Aug. 1997, U.S. Appln. No. 60/043,568 filed on 11 Apr. 1997, U.S. Appln. No. 60/047,595 filed on 23 May 1997, U.S. Appln. No. 60/056,632 filed on 22 Aug. 1997, U.S. Appln. No. 60/043,578 filed on 11 Apr. 1997, U.S. Appln. No. 60/040,333 filed on 07 Mar. 1997, U.S. Appln. No. 60/043,670 filed on 11 Apr. 1997, U.S. Appln. No. 60/047,596 filed on 23 May 1997, U.S. Appln. No. 60/056,864 filed on 22 Aug. 1997, U.S. Appln. No. 60/043,674 filed on 111 Apr. 1997, U.S. Appln. No. 60/047,612 filed on 23 May 1997, U.S. Appln. No. 60/056,631 filed on 22 Aug. 1997, U.S. Appln. No. 60/043,569 filed on 11 Apr. 1997, U.S. Appln. No. 60/047,588 filed on 23 May 1997, U.S. Appln. No. 60/056,876 filed on 22 Aug. 1997, U.S. Appln. No. 60/043,671 filed on 11 Apr. 1997, U.S. Appln. No. 60/043,311 filed on 11 Apr. 1997, U.S. Appln. No. 60/038,621 filed on 07 Mar. 1997, U.S. Appln. No. 60/043,672 filed on 11 Apr. 1997, U.S. Appln. No. 60/047,613 filed on 23 May 1997, U.S. Appln. No. 60/056,636 filed on 22 Aug. 1997, U.S. Appln. No. 60/043,669 filed on 11 Apr. 1997, U.S. Appln. No. 60/047,582 filed on 23 May 1997, U.S. Appln. No. 60/056,910 filed on 22 Aug. 1997, U.S. Appln. No. 60/043,315 filed on 11 Apr. 1997, U.S. Appln. No. 60/047,598 filed on 23 May 1997, U.S. Appln. No. 60/056,874 filed on 22 Aug. 1997, U.S. Appln. No. 60/043,312 filed on 11 Apr. 1997, U.S. Appln. No. 60/047,585 filed on 23 May 1997, U.S. Appln. No. 60/056,881 filed on 22 Aug. 1997, U.S. Appln. No. 60/043,313 filed on 11 Apr. 1997, U.S. Appln. No. 60/047,586 filed on 23 May 1997, U.S. Appln. No. 60/056,909 filed on 22 Aug. 1997, U.S. Appln. No. 60/040,161 filed on 07 Mar. 1997, U.S. Appln. No. 60/047,587 filed on 23 May 1997, U.S. Appln. No. 60/056,879 filed on 22 Aug. 1997, U.S. Appln. No. 60/047,500 filed on 23 May 1997, U.S. Appln. No. 60/056,880 filed on 22 Aug. 1997, U.S. Appln. No. 60/047,584 filed on 23 May 1997, U.S. Appln. No. 60/056,894 filed on 22 Aug. 1997, U.S. Appln. No. 60/047,492 filed on 23 May 1997, U.S. Appln. No. 60/056,911 filed on 22 Aug. 1997, U.S. Appln. No. 60/040,626 filed on 07 Mar. 1997, U.S. Appln. No. 60/047,503 filed on 23 May 1997, U.S. Appln. No. 60/056,903 filed on 22 Aug. 1997, U.S. Appln. No. 60/047,501 filed on 23 May 1997, U.S. Appln. No. 60/056,637 filed on 22 Aug. 1997, U.S. Appln. No. 60/047,590 filed on 23 May 1997, U.S. Appln. No. 60/056,875 filed on 22 Aug. 1997, U.S. Appln. No. 60/047,581 filed on 23 May 1997, U.S. Appln. No. 60/056,882 filed on 22 Aug. 1997, U.S. Appln. No. 60/047,592 filed on 23 May 1997, U.S. Appln. No. 60/056,888 filed on 22 Aug. 1997, U.S. Appln. No. 60/040,334 filed on 07 Mar. 1997, U.S. Appln. No. 60/047,618 filed on 23 May 1997, U.S. Appln. No. 60/056,872 filed on 22 Aug. 1997, U.S. Appln. No. 60/047,617 filed on 23 May 1997, U.S. Appln. No. 60/056,662 filed on 22 Aug. 1997, U.S. Appln. No. 60/047,589 filed on 23 May 1997, U.S. Appln. No. 60/056,862 filed on 22 Aug. 1997, U.S. Appln. No. 60/047,594 filed on 23 May 1997, U.S. Appln. No. 60/056,884 filed on 22 Aug. 1997, U.S. Appln. No. 60/047,583 filed on 23 May 1997, U.S. Appln. No. 60/056,878 filed on 22 Aug. 1997, U.S. Appln. No. 60/040,336 filed on 07 Mar. 1997, U.S. Appln. No. 60/047,502 filed on 23 May 1997, U.S. Appln. No. 60/056,893 filed on 22 Aug. 1997, U.S. Appln. No. 60/047,633 filed on 23 May 1997, U.S. Appln. No. 60/056,630 filed on 22 Aug. 1997, U.S. Appln. No. 60/047,593 filed on 23 May 1997, U.S. Appln. No. 60/056,887 filed on 22 Aug. 1997, U.S. Appln. No. 60/040,163 filed on 07 Mar. 1997, U.S. Appln. No. 60/047,597 filed on 23 May 1997, U.S. Appln. No. 60/056,889 filed on 22 Aug. 1997, U.S. Appln. No. 60/047,615 filed on 23 May 1997, U.S. Appln. No. 60/056,877 filed on 22 Aug. 1997, U.S. Appln. No. 60/047,600 filed on 23 May 1997, U.S. Appln. No. 60/056,886 filed on 22 Aug. 1997, U.S. Appln. No. 60/047,614 filed on 23 May 1997, U.S. Appln. No. 60/056,908 filed on 22 Aug. 1997, U.S. Appln. No. 60/040,710 filed on 14 Mar. 1997, U.S. Appln. No. 60/050,934 filed on 30 May 1997, U.S. Appln. No. 60/048,100 filed on 30 May 1997, U.S. Appln. No. 60/040,762 filed on 14 Mar. 1997, U.S. Appln. No. 60/048,357 filed on 30 May 1997, U.S. Appln. No. 60/048,189 filed on 30 May 1997, U.S. Appln. No. 60/041,277 filed on 21 Mar. 1997, U.S. Appln. No. 60/048,188 filed on 30 May 1997, U.S. Appln. No. 60/048,094 filed on 30 May 1997, U.S. Appln. No. 60/048,350 filed on 30 May 1997, U.S. Appln. No. 60/048,135 filed on 30 May 1997, U.S. Appln. No. 60/042,344 filed on 21 Mar. 1997, U.S. Appln. No. 60/048,187 filed on 30 May 1997, U.S. Appln. No. 60/048,099 filed on 30 May 1997, U.S. Appln. No. 60/050,937 filed on 30 May 1997, U.S. Appln. No. 60/048,352 filed on 30 May 1997, U.S. Appln. No. 60/041,276 filed on 21 Mar. 1997, U.S. Appln. No. 60/048,069 filed on 30 May 1997, U.S. Appln. No. 60/048,131 filed on 30 May 1997, U.S. Appln. No. 60/048,186 filed on 30 May 1997, U.S. Appln. No. 60/048,095 filed on 30 May 1997, U.S. Appln. No. 60/041,281 filed on 21 Mar. 1997, U.S. Appln. No. 60/048,355 filed on 30 May 1997, U.S. Appln. No. 60/048,096 filed on 30 May 1997, U.S. Appln. No. 60/048,351 filed on 30 May 1997, U.S. Appln. No. 60/048,154 filed on 30 May 1997, U.S. Appln. No. 60/048,160 filed on 30 May 1997, U.S. Appln. No. 60/042,825 filed on 08 Apr. 1997, U.S. Appln. No. 60/048,070 filed on 30 May 1997, U.S. Appln. No. 60/042,727 filed on 08 Apr. 1997, U.S. Appln. No. 60/048,068 filed on 30 May 1997, U.S. Appln. No. 60/042,726 filed on 08 Apr. 1997, U.S. Appln. No. 60/048,184 filed on 30 May 1997, U.S. Appln. No. 60/042,728 filed on 08 Apr. 1997, U.S. Appln. No. 60/042,754 filed on 08 Apr. 1997, U.S. Appln. No. 60/048,190 filed on 30 May 1997, U.S. Appln. No. 60/044,039 filed on 30 May 1997, U.S. Appln. No. 60/048,093 filed on 30 May 1997, U.S. Appln. No. 60/048,885 filed on 06 Jun. 1997, U.S. Appln. No. 60/057,645 filed on 05 Sep. 1997, U.S. Appln. No. 60/049,375 filed on 06 Jun. 1997, U.S. Appln. No. 60/057,642 filed on 05 Sep. 1997, U.S. Appln. No. 60/048,881 filed on 06 Jun. 1997, U.S. Appln. No. 60/057,668 filed on 05 Sep. 1997, U.S. Appln. No. 60/048,880 filed on 06 Jun. 1997, U.S. Appln. No. 60/057,635 filed on 05 Sep. 1997, U.S. Appln. No. 60/048,896 filed on 06 Jun. 1997, U.S. Appln. No. 60/057,627 filed on 05 Sep. 1997, U.S. Appln. No. 60/049,020 filed on 06 Jun. 1997, U.S. Appln. No. 60/057,667 filed on 05 Sep. 1997, U.S. Appln. No. 60/048,876 filed on 06 Jun. 1997, U.S. Appln. No. 60/057,666 filed on 05 Sep. 1997, U.S. Appln. No. 60/048,895 filed on 06 Jun. 1997, U.S. Appln. No. 60/057,764 filed on 05 Sep. 1997, U.S. Appln. No. 60/048,884 filed on 06 Jun. 1997, U.S. Appln. No. 60/057,643 filed on 05 Sep. 1997, U.S. Appln. No. 60/048,894 filed on 06 Jun. 1997, U.S. Appln. No. 60/057,769 filed on 05 Sep. 1997, U.S. Appln. No. 60/048,971 filed on 06 Jun. 1997, U.S. Appln. No. 60/057,763 filed on 05 Sep. 1997, U.S. Appln. No. 60/048,964 filed on 06 Jun. 1997, U.S. Appln. No. 60/057,650 filed on 05 Sep. 1997, U.S. Appln. No. 60/048,882 filed on 06 Jun. 1997, U.S. Appln. No. 60/057,584 filed on 05 Sep. 1997, U.S. Appln. No. 60/048,899 filed on 06 Jun. 1997, U.S. Appln. No. 60/057,647 filed on 05 Sep. 1997, U.S. Appln. No. 60/048,893 filed on 06 Jun. 1997, U.S. Appln. No. 60/057,661 filed on 05 Sep. 1997, U.S. Appln. No. 60/048,900 filed on 06 Jun. 1997, U.S. Appln. No. 60/057,662 filed on 05 Sep. 1997, U.S. Appln. No. 60/048,901 filed on 06 Jun. 1997, U.S. Appln. No. 60/057,646 filed on 05 Sep. 1997, U.S. Appln. No. 60/048,892 filed on 06 Jun. 1997, U.S. Appln. No. 60/057,654 filed on 05 Sep. 1997, U.S. Appln. No. 60/048,915 filed on 06 Jun. 1997, U.S. Appln. No. 60/057,651 filed on 05 Sep. 1997, U.S. Appln. No. 60/049,019 filed on 06 Jun. 1997, U.S. Appln. No. 60/057,644 filed on 05 Sep. 1997, U.S. Appln. No. 60/048,970 filed on 06 Jun. 1997, U.S. Appln. No. 60/057,765 filed on 05 Sep. 1997, U.S. Appln. No. 60/048,972 filed on 06 Jun. 1997, U.S. Appln. No. 60/057,762 filed on 05 Sep. 1997, U.S. Appln. No. 60/048,916 filed on 06 Jun. 1997, U.S. Appln. No. 60/057,775 filed on 05 Sep. 1997, U.S. Appln. No. 60/049,373 filed on 06 Jun. 1997, U.S. Appln. No. 60/057,648 filed on 05 Sep. 1997, U.S. Appln. No. 60/048,875 filed on 06 Jun. 1997, U.S. Appln. No. 60/057,774 filed on 05 Sep. 1997, U.S. Appln. No. 60/049,374 filed on 06 Jun. 1997, U.S. Appln. No. 60/057,649 filed on 05 Sep. 1997, U.S. Appln. No. 60/048,917 filed on 06 Jun. 1997, U.S. Appln. No. 60/057,770 filed on 05 Sep. 1997, U.S. Appln. No. 60/048,949 filed on 06 Jun. 1997, U.S. Appln. No. 60/057,771 filed on 05 Sep. 1997, U.S. Appln. No. 60/048,974 filed on 06 Jun. 1997, U.S. Appln. No. 60/057,761 filed on 05 Sep. 1997, U.S. Appln. No. 60/048,883 filed on 06 Jun. 1997, U.S. Appln. No. 60/057,760 filed on 05 Sep. 1997, U.S. Appln. No. 60/048,897 filed on 06 Jun. 1997, U.S. Appln. No. 60/057,776 filed on 05 Sep. 1997, U.S. Appln. No. 60/048,898 filed on 06 Jun. 1997, U.S. Appln. No. 60/057,778 filed on 05 Sep. 1997, U.S. Appln. No. 60/048,962 filed on 06 Jun. 1997, U.S. Appln. No. 60/057,629 filed on 05 Sep. 1997, U.S. Appln. No. 60/048,963 filed on 06 Jun. 1997, U.S. Appln. No. 60/057,628 filed on 05 Sep. 1997, U.S. Appln. No. 60/048,877 filed on 06 Jun. 1997, U.S. Appln. No. 60/057,777 filed on 05 Sep. 1997, U.S. Appln. No. 60/048,878 filed on 06 Jun. 1997, U.S. Appln. No. 60/057,634 filed on 05 Sep. 1997, U.S. Appln. No. 60/049,608 filed on 13 Jun. 1997, U.S. Appln. No. 60/058,669 filed on 12 Sep. 1997, U.S. Appln. No. 60/049,566 filed on 13 Jun. 1997, U.S. Appln. No. 60/058,668 filed on 12 Sep. 1997, U.S. Appln. No. 60/052,989 filed on 13 Jun. 1997, U.S. Appln. No. 60/058,750 filed on 12 Sep. 1997, U.S. Appln. No. 60/049,607 filed on 13 Jun. 1997, U.S. Appln. No. 60/058,665 filed on 12 Sep. 1997, U.S. Appln. No. 60/049,611 filed on 13 Jun. 1997, U.S. Appln. No. 60/058,971 filed on 12 Sep. 1997, U.S. Appln. No. 60/050,901 filed on 13 Jun. 1997, U.S. Appln. No. 60/058,972 filed on 12 Sep. 1997, U.S. Appln. No. 60/049,609 filed on 13 Jun. 1997, U.S. Appln. No. 60/058,975 filed on 12 Sep. 1997, U.S. Appln. No. 60/048,356 filed on 30 May 1997, U.S. Appln. No. 60/056,296 filed on 29 Aug. 1997, U.S. Appln. No. 60/048,101 filed on 30 May 1997, U.S. Appln. No. 60/056,293 filed on 29 Aug. 1997, U.S. Appln. No. 60/050,935 filed on 30 May 1997, U.S. Appln. No. 60/056,250 filed on 29 Aug. 1997, U.S. Appln. No. 60/049,610 filed on 13 Jun. 1997, U.S. Appln. No. 60/061,060 filed on 02 Oct. 1997, U.S. Appln. No. 60/049,606 filed on 13 Jun. 1997, U.S. Appln. No. 60/060,841 filed on 02 Oct. 1997, U.S. Appln. No. 60/049,550 filed on 13 Jun. 1997, U.S. Appln. No. 60/060,834 filed on 02 Oct. 1997, U.S. Appln. No. 60/049,549 filed on 13 Jun. 1997, U.S. Appln. No. 60/060,865 filed on 02 Oct. 1997, U.S. Appln. No. 60/049,548 filed on 13 Jun. 1997, U.S. Appln. No. 60/060,844 filed on 02 Oct. 1997, U.S. Appln. No. 60/049,547 filed on 13 Jun. 1997, U.S. Appln. No. 60/061,059 filed on 02 Oct. 1997, U.S. Appln. No. 60/051,381 filed on 01 Jul. 1997, U.S. Appln. No. 60/058,598 filed on 12 Sep. 1997, U.S. Appln. No. 60/051,480 filed on 01 Jul. 1997, U.S. Appln. No. 60/058,663 filed on 12 Sep. 1997, U.S. Appln. No. 60/051,926 filed on 08 Jul. 1997, U.S. Appln. No. 60/058,785 filed on 12 Sep. 1997, U.S. Appln. No. 60/052,793 filed on 08 Jul. 1997, U.S. Appln. No. 60/058,664 filed on 12 Sep. 1997, U.S. Appln. No. 60/051,925 filed on 08 Jul. 1997, U.S. Appln. No. 60/058,660 filed on 12 Sep. 1997, U.S. Appln. No. 60/051,929 filed on 08 Jul. 1997, U.S. Appln. No. 60/058,661 filed on 12 Sep. 1997, U.S. Appln. No. 60/052,803 filed on 08 Jul. 1997, U.S. Appln. No. 60/055,722 filed on 18 Aug. 1997, U.S. Appln. No. 60/052,732 filed on 08 Jul. 1997, U.S. Appln. No. 60/055,723 filed on 18 Aug. 1997, U.S. Appln. No. 60/051,932 filed on 08 Jul. 1997, U.S. Appln. No. 60/055,948 filed on 18 Aug. 1997, U.S. Appln. No. 60/051,931 filed on 08 Jul. 1997, U.S. Appln. No. 60/055,949 filed on 18 Aug. 1997, U.S. Appln. No. 60/051,916 filed on 08 Jul. 1997, U.S. Appln. No. 60/055,953 filed on 18 Aug. 1997, U.S. Appln. No. 60/051,930 filed on 08 Jul. 1997, U.S. Appln. No. 60/055,950 filed on 18 Aug. 1997, U.S. Appln. No. 60/051,918 filed on 08 Jul. 1997, U.S. Appln. No. 60/055,947 filed on 18 Aug. 1997, U.S. Appln. No. 60/051,920 filed on 08 Jul. 1997, U.S. Appln. No. 60/055,964 filed on 18 Aug. 1997, U.S. Appln. No. 60/052,733 filed on 08 Jul. 1997, U.S. Appln. No. 60/056,360 filed on 18 Aug. 1997, U.S. Appln. No. 60/052,795 filed on 08 Jul. 1997, U.S. Appln. No. 60/055,684 filed on 18 Aug. 1997, U.S. Appln. No. 60/051,919 filed on 08 Jul. 1997, U.S. Appln. No. 60/055,984 filed on 18 Aug. 1997, U.S. Appln. No. 60/051,928 filed on 08 Jul. 1997, U.S. Appln. No. 60/055,954 filed on 18 Aug. 1997, U.S. Appln. No. 60/052,870 filed on 16 Jul. 1997, U.S. Appln. No. 60/055,952 filed on 18 Aug. 1997, U.S. Appln. No. 60/052,871 filed on 16 Jul. 1997, U.S. Appln. No. 60/055,725 filed on 18 Aug. 1997, U.S. Appln. No. 60/052,872 filed on 16 Jul. 1997, U.S. Appln. No. 60/056,359 filed on 18 Aug. 1997, U.S. Appln. No. 60/052,661 filed on 16 Jul. 1997, U.S. Appln. No. 60/055,985 filed on 18 Aug. 1997, U.S. Appln. No. 60/052,874 filed on 16 Jul. 1997, U.S. Appln. No. 60/055,724 filed on 18 Aug. 1997, U.S. Appln. No. 60/052,873 filed on 16 Jul. 1997, U.S. Appln. No. 60/055,726 filed on 18 Aug. 1997, U.S. Appln. No. 60/052,875 filed on 16 Jul. 1997, U.S. Appln. No. 60/056,361 filed on 18 Aug. 1997, U.S. Appln. No. 60/053,440 filed on 22 Jul. 1997, U.S. Appln. No. 60/055,989 filed on 18 Aug. 1997, U.S. Appln. No. 60/053,441 filed on 22 Jul. 1997, U.S. Appln. No. 60/055,946 filed on 18 Aug. 1997, U.S. Appln. No. 60/053,442 filed on 22 Jul. 1997, U.S. Appln. No. 60/055,683 filed on 18 Aug. 1997, U.S. Appln. No. 60/054,212 filed on 30 Jul. 1997, U.S. Appln. No. 60/055,968 filed on 18 Aug. 1997, U.S. Appln. No. 60/054,209 filed on 30 Jul. 1997, U.S. Appln. No. 60/055,972 filed on 18 Aug. 1997, U.S. Appln. No. 60/054,234 filed on 30 Jul. 1997, U.S. Appln. No. 60/055,969 filed on 18 Aug. 1997, U.S. Appln. No. 60/055,386 filed on 05 Aug. 1997, U.S. Appln. No. 60/055,986 filed on 18 Aug. 1997, U.S. Appln. No. 60/054,807 filed on 05 Aug. 1997, U.S. Appln. No. 60/055,970 filed on 18 Aug. 1997, U.S. Appln. No. 60/054,215 filed on 30 Jul. 1997, U.S. Appln. No. 60/056,543 filed on 19 Aug. 1997, U.S. Appln. No. 60/054,218 filed on 30 Jul. 1997, U.S. Appln. No. 60/056,561 filed on 19 Aug. 1997, U.S. Appln. No. 60/054,214 filed on 30 Jul. 1997, U.S. Appln. No. 60/056,534 filed on 19 Aug. 1997, U.S. Appln. No. 60/054,236 filed on 30 Jul. 1997, U.S. Appln. No. 60/056,729 filed on 19 Aug. 1997, U.S. Appln. No. 60/054,213 filed on 30 Jul. 1997, U.S. Appln. No. 60/056,727 filed on 19 Aug. 1997, U.S. Appln. No. 60/054,211 filed on 30 Jul. 1997, U.S. Appln. No. 60/056,554 filed on 19 Aug. 1997, U.S. Appln. No. 60/054,217 filed on 30 Jul. 1997, U.S. Appln. No. 60/056,730 filed on 19 Aug. 1997, U.S. Appln. No. 60/055,312 filed on 05 Aug. 1997, U.S. Appln. No. 60/056,563 filed on 19 Aug. 1997, U.S. Appln. No. 60/055,309 filed on 05 Aug. 1997, U.S. Appln. No. 60/056,557 filed on 19 Aug. 1997, U.S. Appln. No. 60/055,310 filed on 05 Aug. 1997, U.S. Appln. No. 60/056,371 filed on 19 Aug. 1997, U.S. Appln. No. 60/054,798 filed on 05 Aug. 1997, U.S. Appln. No. 60/056,732 filed on 19 Aug. 1997, U.S. Appln. No. 60/056,369 filed on 19 Aug. 1997, U.S. Appln. No. 60/056,535 filed on 19 Aug. 1997, U.S. Appln. No. 60/056,556 filed on 19 Aug. 1997, U.S. Appln. No. 60/056,555 filed on 19 Aug. 1997, U.S. Appln. No. 60/054,806 filed on 05 Aug. 1997, U.S. Appln. No. 60/056,366 filed on 19 Aug. 1997, U.S. Appln. No. 60/054,809 filed on 05 Aug. 1997, U.S. Appln. No. 60/056,364 filed on 19 Aug. 1997, U.S. Appln. No. 60/054,804 filed on 05 Aug. 1997, U.S. Appln. No. 60/056,370 filed on 19 Aug. 1997, U.S. Appln. No. 60/054,803 filed on 05 Aug. 1997, U.S. Appln. No. 60/056,731 filed on 19 Aug. 1997, U.S. Appln. No. 60/055,311 filed on 05 Aug. 1997, U.S. Appln. No. 60/056,365 filed on 19 Aug. 1997, U.S. Appln. No. 60/054,808 filed on 05 Aug. 1997, U.S. Appln. No. 60/056,367 filed on 19 Aug. 1997, U.S. Appln. No. 60/056,726 filed on 19 Aug. 1997, U.S. Appln. No. 60/056,368 filed on 19 Aug. 1997, U.S. Appln. No. 60/056,728 filed on 19 Aug. 1997, U.S. Appln. No. 60/056,628 filed on 19 Aug. 1997, U.S. Appln. No. 60/056,629 filed on 19 Aug. 1997, U.S. Appln. No. 60/056,270 filed on 29 Aug. 1997, U.S. Appln. No. 60/056,271 filed on 29 Aug. 1997, U.S. Appln. No. 60/056,247 filed on 29 Aug. 1997, U.S. Appln. No. 60/056,073 filed on 29 Aug. 1997, U.S. Appln. No. 60/057,669 filed on 05 Sep. 1997, U.S. Appln. No. 60/057,663 filed on 05 Sep. 1997, U.S. Appln. No. 60/057,626 filed on 05 Sep. 1997, U.S. Appln. No. 60/058,666 filed on 12 Sep. 1997, U.S. Appln. No. 60/058,973 filed on 12 Sep. 1997, U.S. Appln. No. 60/058,974 filed on 12 Sep. 1997, U.S. Appln. No. 60/058,667 filed on 12 Sep. 1997, U.S. Appln. No. 60/060,837 filed on 02 Oct. 1997, U.S. Appln. No. 60/060,862 filed on 02 Oct. 1997, U.S. Appln. No. 60/060,839 filed on 02 Oct. 1997, U.S. Appln. No. 60/060,866 filed on 02 Oct. 1997, U.S. Appln. No. 60/060,843 filed on 02 Oct. 1997, U.S. Appln. No. 60/060,836 filed on 02 Oct. 1997, U.S. Appln. No. 60/060,838 filed on 02 Oct. 1997, U.S. Appln. No. 60/060,874 filed on 02 Oct. 1997, U.S. Appln. No. 60/060,833 filed on 02 Oct. 1997, U.S. Appln. No. 60/060,884 filed on 02 Oct. 1997, U.S. Appln. No. 60/060,880 filed on 02 Oct. 1997, U.S. Appln. No. 60/061,463 filed on 09 Oct. 1997, U.S. Appln. No. 60/061,529 filed on 09 Oct. 1997, U.S. Appln. No. 60/071,498 filed on 09 Oct. 1997, U.S. Appln. No. 60/061,527 filed on 09 Oct. 1997, U.S. Appln. No. 60/061,536 filed on 09 Oct. 1997, U.S. Appln. No. 60/061,532 filed on 09 Oct. 1997, U.S. Appln. No. 60/063,099 filed on 24 Oct. 1997, U.S. Appln. No. 60/063,088 filed on 24 Oct. 1997, U.S. Appln. No. 60/063,100 filed on 24 Oct. 1997, U.S. Appln. No. 60/063,387 filed on 24 Oct. 1997, U.S. Appln. No. 60/063,148 filed on 24 Oct. 1997, U.S. Appln. No. 60/063,386 filed on 24 Oct. 1997, U.S. Appln. No. 60/062,784 filed on 24 Oct. 1997, U.S. Appln. No. 60/063,091 filed on 24 Oct. 1997, U.S. Appln. No. 60/063,090 filed on 24 Oct. 1997, U.S. Appln. No. 60/063,089 filed on 24 Oct. 1997, U.S. Appln. No. 60/063,092 filed on 24 Oct. 1997, U.S. Appln. No. 60/063,111 filed on 24 Oct. 1997, U.S. Appln. No. 60/063,101 filed on 24 Oct. 1997, U.S. Appln. No. 60/063,109 filed on 24 Oct. 1997, U.S. Appln. No. 60/063,110 filed on 24 Oct. 1997, U.S. Appln. No. 60/063,098 filed on 24 Oct. 1997, U.S. Appln. No. 60/063,097 filed on 24 Oct. 1997, U.S. Appln. No. 60/064,911 filed on 07 Nov. 1997, U.S. Appln. No. 60/064,912 filed on 07 Nov. 1997, U.S. Appln. No. 60/064,983 filed on 07 Nov. 1997, U.S. Appln. No. 60/064,900 filed on 07 Nov. 1997, U.S. Appln. No. 60/064,988 filed on 07 Nov. 1997, U.S. Appln. No. 60/064,987 filed on 07 Nov. 1997, U.S. Appln. No. 60/064,908 filed on 07 Nov. 1997, U.S. Appln. No. 60/064,984 filed on 07 Nov. 1997, U.S. Appln. No. 60/064,985 filed on 07 Nov. 1997, U.S. Appln. No. 60/066,094 filed on 17 Nov. 1997, U.S. Appln. No. 60/066,100 filed on 17 Nov. 1997, U.S. Appln. No. 60/066,089 filed on 17 Nov. 1997, U.S. Appln. No. 60/066,095 filed on 17 Nov. 1997, U.S. Appln. No. 60/066,090 filed on 17 Nov. 1997, U.S. Appln. No. 60/068,006 filed on 18 Dec. 1997, U.S. Appln. No. 60/068,057 filed on 18 Dec. 1997, U.S. Appln. No. 60/068,007 filed on 18 Dec. 1997, U.S. Appln. No. 60/068,008 filed on 18 Dec. 1997, U.S. Appln. No. 60/068,054 filed on 18 Dec. 1997, U.S. Appln. No. 60/068,064 filed on 18 Dec. 1997, U.S. Appln. No. 60/068,053 filed on 18 Dec. 1997, U.S. Appln. No. 60/070,923 filed on 18 Dec. 1997, U.S. Appln. No. 60/068,365 filed on 19 Dec. 1997, U.S. Appln. No. 60/068,169 filed on 19 Dec. 1997, U.S. Appln. No. 60/068,367 filed on 19 Dec. 1997, U.S. Appln. No. 60/068,369 filed on 19 Dec. 1997, U.S. Appln. No. 60/068,368 filed on 19 Dec. 1997, U.S. Appln. No. 60/070,657 filed on 07 Jan. 1998, U.S. Appln. No. 60/070,692 filed on 07 Jan. 1998, U.S. Appln. No. 60/070,704 filed on 07 Jan. 1998, U.S. Appln. No. 60/070,658 filed on 07 Jan. 1998, U.S. Appln. No. 60/073,160 filed on 30 Jan. 1998, U.S. Appln. No. 60/073,159 filed on 30 Jan. 1998, U.S. Appln. No. 60/073,165 filed on 30 Jan. 1998, U.S. Appln. No. 60/073,164 filed on 30 Jan. 1998, U.S. Appln. No. 60/073,167 filed on 30 Jan. 1998, U.S. Appln. No. 60/073,162 filed on 30 Jan. 1998, U.S. Appln. No. 60/073,161 filed on 30 Jan. 1998, U.S. Appln. No. 60/073,170 filed on 30 Jan. 1998, U.S. Appln. No. 60/074,141 filed on 09 Feb. 1998, U.S. Appln. No. 60/074,341 filed on 09 Feb. 1998, U.S. Appln. No. 60/074,037 filed on 09 Feb. 1998, U.S. Appln. No. 60/074,157 filed on 09 Feb. 1998, U.S. Appln. No. 60/074,118 filed on 09 Feb. 1998, U.S. Appln. No. 60/076,051 filed on 26 Feb. 1998, U.S. Appln. No. 60/076,053 filed on 26 Feb. 1998, U.S. Appln. No. 60/076,054 filed on 26 Feb. 1998, U.S. Appln. No. 60/076,052 filed on 26 Feb. 1998, U.S. Appln. No. 60/076,057 filed on 26 Feb. 1998, U.S. Appln. No. 60/077,714 filed on 12 Mar. 1998, U.S. Appln. No. 60/077,687 filed on 12 Mar. 1998, U.S. Appln. No. 60/077,686 filed on 12 Mar. 1998, U.S. Appln. No. 60/077,696 filed on 12 Mar. 1998, U.S. Appln. No. 60/078,566 filed on 19 Mar. 1998, U.S. Appln. No. 60/078,574 filed on 19 Mar. 1998, U.S. Appln. No. 60/078,576 filed on 19 Mar. 1998, U.S. Appln. No. 60/078,579 filed on 19 Mar. 1998, U.S. Appln. No. 60/078,563 filed on 19 Mar. 1998, U.S. Appln. No. 60/078,573 filed on 19 Mar. 1998, U.S. Appln. No. 60/078,578 filed on 19 Mar. 1998, U.S. Appln. No. 60/078,581 filed on 19 Mar. 1998, U.S. Appln. No. 60/078,577 filed on 19 Mar. 1998, U.S. Appln. No. 60/080,314 filed on 01 Apr. 1998, U.S. Appln. No. 60/080,312 filed on 01 Apr. 1998, U.S. Appln. No. 60/080,313 filed on 01 Apr. 1998, U.S. Appln. No. 60/085,180 filed on 12 May 1998, U.S. Appln. No. 60/085,105 filed on 12 May 1998, U.S. Appln. No. 60/085,094 filed on 12 May 1998, U.S. Appln. No. 60/085,093 filed on 12 May 1998, U.S. Appln. No. 60/085,924 filed on 18 May 1998, U.S. Appln. No. 60/085,906 filed on 18 May 1998, U.S. Appln. No. 60/085,927 filed on 18 May 1998, U.S. Appln. No. 60/085,920 filed on 18 May 1998, U.S. Appln. No. 60/085,928 filed on 18 May 1998, U.S. Appln. No. 60/085,925 filed on 18 May 1998, U.S. Appln. No. 60/085,921 filed on 18 May 1998, U.S. Appln. No. 60/085,923 filed on 18 May 1998, U.S. Appln. No. 60/085,922 filed on 18 May 1998, U.S. Appln. No. 60/090,112 filed on 22 Jun. 1998, U.S. Appln. No. 60/089,508 filed on 16 Jun. 1998, U.S. Appln. No. 60/089,507 filed on 16 Jun. 1998, U.S. Appln. No. 60/089,510 filed on 16 Jun. 1998, U.S. Appln. No. 60/089,509 filed on 16 Jun. 1998, U.S. Appln. No. 60/090,113 filed on 22 Jun. 1998, U.S. Appln. No. 60/092,956 filed on 15 Jul. 1998, U.S. Appln. No. 60/092,921 filed on 15 Jul. 1998, U.S. Appln. No. 60/092,922 filed on 15 Jul. 1998, U.S. Appln. No. 60/094,657 filed on 30 Jul. 1998, U.S. Appln. No. 60/095,486 filed on 05 Aug. 1998, U.S. Appln. No. 60/096,319 filed on 12 Aug. 1998, U.S. Appln. No. 60/095,455 filed on 06 Aug. 1998, U.S. Appln. No. 60/095,454 filed on 06 Aug. 1998, U.S. Appln. No. 60/097,917 filed on 25 Aug. 1998, U.S. Appln. No. 60/098,634 filed on 31 Aug. 1998, U.S. Appln. No. 60/101,546 filed on 23 Sep. 1998, U.S. Appln. No. 60/102,895 filed on 02 Oct. 1998, U.S. Appln. No. 60/108,207 filed on 12 Nov. 1998, U.S. Appln. No. 60/113,006 filed on 18 Dec. 1998, U.S. Appln. No. 60/112,809 filed on 17 Dec. 1998, U.S. Appln. No. 60/116,330 filed on 19 Jan. 1999, U.S. Appln. No. 60/119,468 filed on 10 Feb. 1999, U.S. Appln. No. 60/125,055 filed on 18 Mar. 1999, U.S. Appln. No. 60/128,693 filed on 09 Apr. 1999, U.S. Appln. No. 60/130,991 filed on 26 Apr. 1999, U.S. Appln. No. 60/137,725 filed on 07 Jun. 1999, U.S. Appln. No. 60/145,220 filed on 23 Jul. 1999, U.S. Appln. No. 60/149,182 filed on 17 Aug. 1999, U.S. Appln. No. 60/152,317 filed on 03 Sep. 1999, U.S. Appln. No. 60/152,315 filed on 03 Sep. 1999, U.S. Appln. No. 60/155,709 filed on 24 Sep. 1999, U.S. Appln. No. 60/163,085 filed on 02 Nov. 1999, U.S. Appln. No. 60/172,411 filed on 17 Dec. 1999, U.S. Appln. No. 60/162,239 filed on 29 Oct. 1999, U.S. Appln. No. 60/215,139 filed on 30 Jun. 2000, U.S. Appln. No. 60/162,211 filed on 29 Oct. 1999, U.S. Appln. No. 60/215,138 filed on 30 Jun. 2000, U.S. Appln. No. 60/162,240 filed on 29 Oct. 1999, U.S. Appln. No. 60/215,131 filed on 30 Jun. 2000, U.S. Appln. No. 60/162,237 filed on 29 Oct. 1999, U.S. Appln. No. 60/219,666 filed on 21 Jul. 2000, U.S. Appln. No. 60/162,238 filed on 29 Oct. 1999, U.S. Appln. No. 60/215,134 filed on 30 Jun. 2000, U.S. Appln. No. 60/163,580 filed on 05 Nov. 1999, U.S. Appln. No. 60/215,130 filed on 30 Jun. 2000, U.S. Appln. No. 60/163,577 filed on 05 Nov. 1999, U.S. Appln. No. 60/215,137 filed on 30 Jun. 2000, U.S. Appln. No. 60/163,581 filed on 05 Nov. 1999, U.S. Appln. No. 60/215,133 filed on 30 Jun. 2000, U.S. Appln. No. 60/163,576 filed on 05 Nov. 1999, U.S. Appln. No. 60/221,366 filed on 27 Jul. 2000, U.S. Appln. No. 60/164,344 filed on 09 Nov. 1999, U.S. Appln. No. 60/195,296 filed on 07 Apr. 2000, U.S. Appln. No. 60/221,367 filed on 27 Jul. 2000, U.S. Appln. No. 60/164,835 filed on 12 Nov. 1999, U.S. Appln. No. 60/221,142 filed on 27 Jul. 2000, U.S. Appln. No. 60/164,744 filed on 12 Nov. 1999, U.S. Appln. No. 60/215,140 filed on 30 Jun. 2000, U.S. Appln. No. 60/164,735 filed on 12 Nov. 1999, U.S. Appln. No. 60/221,193 filed on 27 Jul. 2000, U.S. Appln. No. 60/164,825 filed on 12 Nov. 1999, U.S. Appln. No. 60/222,904 filed on 03 Aug. 2000, U.S. Appln. No. 60/164,834 filed on 12 Nov. 1999, U.S. Appln. No. 60/224,007 filed on 04 Aug. 2000, U.S. Appln. No. 60/164,750 filed on 12 Nov. 1999, U.S. Appln. No. 60/215,128 filed on 30 Jun. 2000, U.S. Appln. No. 60/166,415 filed on 19 Nov. 1999, U.S. Appln. No. 60/215,136 filed on 30 Jun. 2000, U.S. Appln. No. 60/166,414 filed on 19 Nov. 1999, U.S. Appln. No. 60/219,665 filed on 21 Jul. 2000, U.S. Appln. No. 60/164,731 filed on 12 Nov. 1999, U.S. Appln. No. 60/215,132 filed on 30 Jun. 2000, U.S. Appln. No. 60/226,280 filed on 18 Aug. 2000, U.S. Appln. No. 60/256,968 filed on 21 Dec. 2000, U.S. Appln. No. 60/226,380 filed on 18 Aug. 2000, U.S. Appln. No. 60/259,803 filed on 05 Jan. 2001, U.S. Appln. No. 60/228,084 filed on 28 Aug. 2000, U.S. application Ser. No. 09/915,582 filed on 27 Jul. 2001, U.S. Appln. No. 60/231,968 filed on 12 Sep. 2000, U.S. Appln. No. 60/236,326 filed on 29 Sep. 2000, U.S. Appln. No. 60/234,211 filed on 20 Sep. 2000, U.S. Appln. No. 60/226,282 filed on 18 Aug. 2000, U.S. Appln. No. 60/232,104 filed on 12 Sep. 2000, U.S. Appln. No. 60/234,210 filed on 20 Sep. 2000, U.S. Appln. No. 60/226,278 filed on 18 Aug. 2000, U.S. Appln. No. 60/259,805 filed on 05 Jan. 2001, U.S. Appln. No. 60/226,279 filed on 18 Aug. 2000, U.S. Appln. No. 60/259,678 filed on 05 Jan. 2001, U.S. Appln. No. 60/226,281 filed on 18 Aug. 2000, U.S. Appln. No. 60/231,969 filed on 12 Sep. 2000, U.S. Appln. No. 60/228,086 filed on 28 Aug. 2000, U.S. Appln. No. 60/259,516 filed on 04 Jan. 2001, U.S. Appln. No. 60/228,083 filed on 28 Aug. 2000, U.S. Appln. No. 60/259,804 filed on 05 Jan. 2001, U.S. Appln. No. 60/270,658 filed on 23 Feb. 2001, U.S. Appln. No. 60/304,444 filed on 12 Jul. 2001, U.S. Appln. No. 60/270,625 filed on 23 Feb. 2001, U.S. Appln. No. 60/304,417 filed on 12 Jul. 2001, U.S. Appln. No. 60/295,869 filed on 06 Jun. 2001, U.S. Appln. No. 60/304,121 filed on 11 Jul. 2001, U.S. Appln. No. 60/311,085 filed on 10 Aug. 2001, U.S. Appln. No. 60/325,209 filed on 28 Sep. 2001, U.S. Appln. No. 60/330,629 filed on 26 Oct. 2001, U.S. Appln. No. 60/331,046 filed on 07 Nov. 2001, U.S. Appln. No. 60/358,554 filed on 22 Feb. 2002, U.S. Appln. No. 60/358,714 filed on 25 Feb. 2002, U.S. Appln. No. 60/277,340 filed on 21 Mar. 2001, U.S. Appln. No. 60/306,171 filed on 19 Jul. 2001, U.S. Appln. No. 60/278,650 filed on 27 Mar. 2001, U.S. Appln. No. 60/331,287 filed on 13 Nov. 2001, U.S. application Ser. No. 09/950,082 filed on 12 Sep. 2001, U.S. application Ser. No. 09/950,083 filed on 12 Sep. 2001, PCT Appln. No. US00/29363 filed on 25 Oct. 2000, PCT Appln. No. US00/29360 filed on 25 Oct. 2000, PCT Appln. No. US00/29362 filed on 25 Oct. 2000, PCT Appln. No. US00/29365 filed on 25 Oct. 2000, PCT Appln. No. US00/29364 filed on 25 Oct. 2000, PCT Appln. No. US00/30040 filed on 01 Nov. 2000, PCT Appln. No. US00/30037 filed on 01 Nov. 2000, PCT Appln. No. US00/30045 filed on 01 Nov. 2000, PCT Appln. No. US00/30036 filed on 01 Nov. 2000, PCT Appln. No. US00/30039 filed on 01 Nov. 2000, PCT Appln. No. US00/30654 filed on 08 Nov. 2000, PCT Appln. No. US00/30628 filed on 08 Nov. 2000, PCT Appln. No. US00/30653 filed on 08 Nov. 2000, PCT Appln. No. US00/30629 filed on 08 Nov. 2000, PCT Appln. No. US00/30679 filed on 08 Nov. 2000, PCT Appln. No. US00/30674 filed on 08 Nov. 2000, PCT Appln. No. US00/31162 filed on 15 Nov. 2000, PCT Appln. No. US00/31282 filed on 15 Nov. 2000, PCT Appln. No. US00/30657 filed on 08 Nov. 2000, PCT Appln. No. US01/01396 filed on 17 Jan. 2001, PCT Appln. No. US01/01387 filed on 17 Jan. 2001, PCT Appln. No. US01/01567 filed on 17 Jan. 2001, PCT Appln. No. US01/01431 filed on 17 Jan. 2001, PCT Appln. No. US01/01432 filed on 17 Jan. 2001, PCT Appln. No. US01/00544 filed on 09 Jan. 2001, PCT Appln. No. US01/01435 filed on 17 Jan. 2001, PCT Appln. No. US01/01386 filed on 17 Jan. 2001, PCT Appln. No. US01/01565 filed on 17 Jan. 2001, PCT Appln. No. US01/01394 filed on 17 Jan. 2001, PCT Appln. No. US01/01434 filed on 17 Jan. 2001, PCT Appln. No. US01/01397 filed on 17 Jan. 2001, PCT Appln. No. US01/01385 filed on 17 Jan. 2001, PCT Appln. No. US01/01384 filed on 17 Jan. 2001, PCT Appln. No. US01/01383 filed on 17 Jan. 2001, PCT Appln. No. US02/05064 filed on 21 Feb. 2002, PCT Appln. No. US02/05301 filed on 21 Feb. 2002, U.S. application Ser. No. 09/148,545 filed on 04 Sep. 1998, U.S. application Ser. No. 09/621,011 filed on 20 Jul. 2000, U.S. application Ser. No. 09/981,876 filed on 19 Oct. 2001, U.S. application Ser. No. 09/149,476 filed on 08 Sep. 1998, U.S. application Ser. No. 09/809,391 filed on 16 Mar. 2001, U.S. application Ser. No. 09/882,171 filed on 18 Jun. 2001, U.S. Appln. No. 60/190,068 filed on 17 Mar. 2000, U.S. application Ser. No. 09/152,060 filed on 11 Sep. 1998, U.S. application Ser. No. 09/852,797 filed on 11 May 2001, U.S. application Ser. No. 09/853,161 filed on 11 May 2001, U.S. application Ser. No. 09/852,659 filed on 11 May 2001, U.S. application Ser. No. 10/058,993 filed on 30 Jan. 2002, U.S. Appln. No. 60/265,583 filed on 02 Feb. 2001, U.S. Appln. No. 09/154,707 filed on 17 Sep. 1998, U.S. application Ser. No. 09/966,262 filed on 01 Oct. 2001, U.S. application Ser. No. 09/983,966 filed on 26 Oct. 2001, U.S. application Ser. No. 10/059,395 filed on 31 Jan. 2002, U.S. application Ser. No. 09/984,245 filed on 29 Oct. 2001, U.S. application Ser. No. 09/166,780 filed on 06 Oct. 1998, U.S. application Ser. No. 09/577,145 filed on 24 May 2000, U.S. application Ser. No. 09/814,122 filed on 22 Mar. 2001, U.S. application Ser. No. 09/189,144 filed on 10 Nov. 1998, U.S. application Ser. No. 09/690,454 filed on 18 Oct. 2000, U.S. application Ser. No. 10/062,831 filed on 05 Feb. 2002, U.S. application Ser. No. 10/062,599 filed on 05 Feb. 2002, U.S. application Ser. No. 09/205,258 filed on 04 Dec. 1998, U.S. application Ser. No. 09/933,767 filed on 22 Aug. 2001, U.S. Appln. No. 60/184,836 filed on 24 Feb. 2000, U.S. Appln. No. 60/193,170 filed on 29 Mar. 2000, U.S. application Ser. No. 10/023,282 filed on 20 Dec. 2001, U.S. application Ser. No. 10/004,860 filed on 07 Dec. 2001, U.S. application Ser. No. 09/209,462 filed on 11 Dec. 1998, U.S. application Ser. No. 09/213,365 filed on 17 Dec. 1998, U.S. application Ser. No. 09/627,081 filed on 27 Jul. 2000, U.S. application Ser. No. 09/227,357 filed on 08 Jan. 1999, U.S. application Ser. No. 09/983,802 filed on 25 Oct. 2001, U.S. application Ser. No. 09/973,278 filed on 10 Oct. 2001, U.S. Appln. No. 60/239,899 filed on 13 Oct. 2000, U.S. application Ser. No. 09/984,490 filed on 30 Oct. 2001, U.S. application Ser. No. 09/776,724 filed on 06 Feb. 2001, U.S. application Ser. No. 09/229,982 filed on 14 Jan. 1999, U.S. application Ser. No. 09/669,688 filed on 26 Sep. 2000, U.S. Appln. No. 60/180,909 filed on 08 Feb. 2000, U.S. application Ser. No. 09/236,557 filed on 26 Jan. 1999, U.S. application Ser. No. 09/666,984 filed on 21 Sep. 2000, U.S. application Ser. No. 09/820,649 filed on 30 Mar. 2001, U.S. Appln. No. 60/295,558 filed on 05 Jun. 2001, U.S. application Ser. No. 09/244,112 filed on 04 Feb. 1999, U.S. application Ser. No. 09/774,639 filed on 01 Feb. 2001, U.S. application Ser. No. 09/969,730 filed on 04 Oct. 2001, U.S. Appln. No. 60/238,291 filed on 06 Oct. 2000, U.S. application Ser. No. 09/251,329 filed on 17 Feb. 1999, U.S. application Ser. No. 09/716,128 filed on 17 Nov. 2000, U.S. application Ser. No. 09/257,179 filed on 25 Feb. 1999, U.S. application Ser. No. 09/729,835 filed on 06 Dec. 2000, U.S. application Ser. No. 09/262,109 filed on 04 Mar. 1999, U.S. application Ser. No. 09/722,329 filed on 28 Nov. 2000, U.S. application Ser. No. 09/722,329 filed on 17 Jan. 2002, U.S. Appln. No. 60/262,066 filed on 18 Jan. 2001, U.S. application Ser. No. 09/281,976 filed on 31 Mar. 1999, U.S. application Ser. No. 09/288,143 filed on 08 Apr. 1999, U.S. application Ser. No. 09/984,429 filed on 30 Oct. 2001, U.S. Appln. No. 60/244,591 filed on 01 Nov. 2000, U.S. application Ser. No. 09/296,622 filed on 23 Apr. 1999, U.S. application Ser. No. 09/305,736 filed on 05 May 1999, U.S. application Ser. No. 09/818,683 filed on 28 Mar. 2001, U.S. application Ser. No. 09/974,879 filed on 12 Oct. 2001, U.S. Appln. No. 60/239,893 filed on 13 Oct. 2000, U.S. application Ser. No. 09/334,595 filed on 17 Jun. 1999, U.S. application Ser. No. 09/348,457 filed on 07 Jul. 1999, U.S. application Ser. No. 09/739,907 filed on 20 Dec. 2000, U.S. application Ser. No. 09/938,671 filed on 27 Aug. 2001, U.S. application Ser. No. 09/363,044 filed on 29 Jul. 1999, U.S. application Ser. No. 09/813,153 filed on 21 Mar. 2001, U.S. application Ser. No. 09/949,925 filed on 12 Sep. 2001, U.S. Appln. No. 60/232,150 filed on 12 Sep. 2000, U.S. application Ser. No. 09/369,247 filed on 05 Aug. 1999, U.S. application Ser. No. 10/062,548 filed on 05 Feb. 2002, U.S. application Ser. No. 09/382,572 filed on 25 Aug. 1999, U.S. application Ser. No. 09/716,129 filed on 17 Nov. 2000, U.S. application Ser. No. 09/393,022 filed on 09 Sep. 1999, U.S. application Ser. No. 09/798,889 filed on 06 Mar. 2001, U.S. application Ser. No. 09/397,945 filed on 17 Sep. 1999, U.S. application Ser. No. 09/437,658 filed on 10 Nov. 1999, U.S. application Ser. No. 09/892,877 filed on 28 Jun. 2001, U.S. application Ser. No. 09/948,783 filed on 10 Sep. 2001, U.S. Appln. No. 60/231,846 filed on 11 Sep. 2000, U.S. application Ser. No. 09/461,325 filed on 14 Dec. 1999, U.S. application Ser. No. 10/050,873 filed on 18 Jan. 2002, U.S. Appln. No. 60/263,230 filed on 23 Jan. 2001, U.S. Appln. No. 60/263,681 filed on 24 Jan. 2001, U.S. application Ser. No. 10/012,542 filed on 12 Dec. 2001, U.S. application Ser. No. 09/482,273 filed on 13 Jan. 2000, U.S. Appln. No. 60/234,925 filed on 25 Sep. 2000, U.S. application Ser. No. 09/984,276 filed on 29 Oct. 2001, U.S. application Ser. No. 09/984,271 filed on 29 Oct. 2001, U.S. application Ser. No. 09/489,847 filed on 24 Jan. 2000, U.S. Appln. No. 60/350,898 filed on 25 Jan. 2002, U.S. application Ser. No. 09/511,554 filed on 23 Feb. 2000, U.S. application Ser. No. 09/739,254 filed on 19 Dec. 2000, U.S. application Ser. No. 09/904,615 filed on 16 Jul. 2001, U.S. application Ser. No. 10/054,988 filed on 25 Jan. 2002, U.S. application Ser. No. 09/531,119 filed on 20 Mar. 2000, U.S. application Ser. No. 09/820,893 filed on 30 Mar. 2001, U.S. application Ser. No. 09/565,391 filed on 05 May 2000, U.S. application Ser. No. 09/948,820 filed on 10 Sep. 2001, U.S. application Ser. No. 09/591,316 filed on 09 Jun. 2000, U.S. application Ser. No. 09/895,298 filed on 02 Jul. 2001, U.S. application Ser. No. 09/618,150 filed on 17 Jul. 2000, U.S. application Ser. No. 09/985,153 filed on 01 Nov. 2001, U.S. application Ser. No. 09/628,508 filed on 28 Jul. 2000, U.S. application Ser. No. 09/997,131 filed on 30 Nov. 2001, U.S. application Ser. No. 09/661,453 filed on 13 Sep. 2000, U.S. application Ser. No. 10/050,882 filed on 18 Jan. 2002, U.S. application Ser. No. 09/684,524 filed on 10 Oct. 2000, U.S. application Ser. No. 10/050,704 filed on 18 Jan. 2002, U.S. application Ser. No. 09/726,643 filed on 01 Dec. 2000, U.S. application Ser. No. 10/042,141 filed on 11 Jan. 2002, U.S. application Ser. No. 09/756,168 filed on 09 Jan. 2001, U.S. application Ser. No. 09/781,417 filed on 13 Feb. 2001, U.S. application Ser. No. 10/060,255 filed on 01 Feb. 2002, U.S. application Ser. No. 09/789,561 filed on 22 Feb. 2001, U.S. application Ser. No. 09/800,729 filed on 08 Mar. 2001, U.S. application Ser. No. 09/832,129 filed on 11 Apr. 2001, PCT Appln. No. US98/04482 filed on 06 Mar. 1998, PCT Appln. No. US98/04493 filed on 06 Mar. 1998, PCT Appln. No. US98/04858 filed on 12 Mar. 1998, PCT Appln. No. US98/05311 filed on 19 Mar. 1998, PCT Appln. No. US98/06801 filed on 07 Apr. 1998, PCT Appln. No. US98/10868 filed on 28 May 1998, PCT Appln. No. US98/11422 filed on 04 Jun. 1998, PCT Appln. No. US01/05614 filed on 21 Feb. 2001, PCT Appln. No. US98/12125 filed on 11 Jun. 1998, PCT Appln. No. US98/13608 filed on 30 Jun. 1998, PCT Appln. No. US98/13684 filed on 07 Jul. 1998, PCT Appln. No. US98/14613 filed on 15 Jul. 1998, PCT Appln. No. US98/15949 filed on 29 Jul. 1998, PCT Appln. No. US98/16235 filed on 04 Aug. 1998, PCT Appln. No. US98/17044 filed on 18 Aug. 1998, PCT Appln. No. US98/17709 filed on 27 Aug. 1998, PCT Appln. No. US98/18360 filed on 03 Sep. 1998, PCT Appln. No. US02/01109 filed on 17 Jan. 2002, PCT Appln. No. US98/20775 filed on 01 Oct. 1998, PCT Appln. No. US98/21142 filed on 08 Oct. 1998, PCT Appln. No. US98/22376 filed on 23 Oct. 1998, PCT Appln. No. US98/23435 filed on 04 Nov. 1998, PCT Appln. No. US98/27059 filed on 17 Dec. 1998, PCT Appln. No. US99/00108 filed on 06 Jan. 1999, PCT Appln. No. US99/01621 filed on 27 Jan. 1999, PCT Appln. No. US99/02293 filed on 04 Feb. 1999, PCT Appln. No. US99/03939 filed on 24 Feb. 1999, PCT Appln. No. US99/05721 filed on 11 Mar. 1999, PCT Appln. No. US99/05804 filed on 18 Mar. 1999, PCT Appln. No. US99/09847 filed on 06 May 1999, PCT Appln. No. US99/13418 filed on 15 Jun. 1999, PCT Appln. No. US99/15849 filed on 14 Jul. 1999, PCT Appln. No. US01/00911 filed on 12 Jan. 2001, PCT Appln. No. US01/29871 filed on 24 Sep. 2001, PCT Appln. No. US99/17130 filed on 29 Jul. 1999, PCT Appln. No. US99/19330 filed on 24 Aug. 1999, PCT Appln. No. US99/22012 filed on 22 Sep. 1999, PCT Appln. No. US99/26409 filed on 09 Nov. 1999, PCT Appln. No. US99/29950 filed on 16 Dec. 1999, PCT Appln. No. US00/00903 filed on 18 Jan. 2000, PCT Appln. No. US00/03062 filed on 08 Feb. 2000, PCT Appln. No. US00/06783 filed on 16 Mar. 2000, PCT Appln. No. US00/08979 filed on 06 Apr. 2000, PCT Appln. No. US00/15187 filed on 02 Jun. 2000, PCT Appln. No. US00/19735 filed on 20 Jul. 2000, PCT Appln. No. US00/22325 filed on 16 Aug. 2000, PCT Appln. No. US00/24008 filed on 31 Aug. 2000, PCT Appln. No. US00/26013 filed on 22 Sep. 2000, PCT Appln. No. US00/28664 filed on 17 Oct. 2000, U.S. application Ser. No. 09/833,245 filed on 12 Apr. 2001, PCT Appln. No. US01/11988 filed on 12 Apr. 2001, U.S. application Ser. No. 10/100,683 filed 19 Mar. 2002, PCT Appln. No. US02/08278 filed on 19 Mar. 2002, PCT Appln. No. US02/08279 filed on 19 Mar. 2002, PCT Appln. No. US02/08123 filed on 19 Mar. 2002, PCT Appln. No. US02/09785 filed on 19 Mar. 2002, PCT Appln. No. US02/08276 filed on 19 Mar. 2002, PCT Appln. No. US02/08277 filed on 19 Mar. 2002, and PCT Appln. No. US02/08124 filed on 19 Mar. 2002.

What is claimed is:

1. An isolated nucleic acid molecule comprising a first polynucleotide sequence at least 95% identical to a second polynucleotide sequence selected from the group consisting of:
(a) a polynucleotide fragment of SEQ ID NO:X as referenced in Table 1A;
(b) a polynucleotide encoding a full length polypeptide of SEQ ID NO:Y or a full length polypeptide encoded by the cDNA Clone ID in ATCC Deposit No:Z corresponding to SEQ ID NO:Y as referenced in Table 1A;
(c) a polynucleotide encoding a polypeptide fragment of SEQ ID NO:Y or a polypeptide fragment encoded by the cDNA Clone ID in ATCC Deposit No:Z corresponding to SEQ ID NO:Y as referenced in Table 1A;
(d) a polynucleotide encoding a polypeptide fragment of SEQ ID NO:Y or a polypeptide fragment encoded by the cDNA Clone ID in ATCC Deposit No:Z corresponding to SEQ ID NO:Y as referenced in Table 1A, wherein said fragment has biological activity;
(e) a polynucleotide encoding a polypeptide domain of SEQ ID NO:Y as referenced in Table 1B;
(f) a polynucleotide encoding a polypeptide domain of SEQ ID NO:Y as referenced in Table 2;
(g) a polynucleotide encoding a predicted epitope of SEQ ID NO:Y as referenced in Table 1B; and
(h) a polynucleotide capable of hybridizing under stringent conditions to any one of the polynucleotides specified in (a)-(g), wherein said polynucleotide does not hybridize under stringent conditions to a nucleic acid molecule having a nucleotide sequence of only A residues or of only T residues.

2. The isolated nucleic acid molecule of claim 1, wherein the polynucleotide fragment comprises a nucleotide sequence encoding a secreted form of SEQ ID NO:Y or a secreted form of the polypeptide encoded by the cDNA Clone ID in ATCC Deposit No:Z corresponding to SEQ ID NO:Y, as referenced in Table 1A.

3. The isolated nucleic acid molecule of claim 1, wherein the polynucleotide fragment comprises a nucleotide sequence encoding the sequence identified as SEQ ID NO:Y or the polypeptide encoded by the cDNA sequence included in ATCC Deposit No:Z, which is hybridizable to SEQ ID NO:X, as referenced in Table 1A.

4. The isolated nucleic acid molecule of claim 1, wherein the polynucleotide fragment comprises the entire nucleotide sequence of SEQ ID NO:X or the cDNA sequence included in ATCC Deposit No:Z, which is hybridizable to SEQ ID NO:X, as referenced in Table 1A.

5. The isolated nucleic acid molecule of claim 2, wherein the nucleotide sequence comprises sequential nucleotide deletions from either the C-terminus or the N-terminus.

6. The isolated nucleic acid molecule of claim 3, wherein the nucleotide sequence comprises sequential nucleotide deletions from either the C-terminus or the N-terminus.

7. A recombinant vector comprising the isolated nucleic acid molecule of claim 1.

8. A method of making a recombinant host cell comprising the isolated nucleic acid molecule of claim 1.

9. A recombinant host cell produced by the method of claim 8.

10. The recombinant host cell of claim 9 comprising vector sequences.

11. A polypeptide comprising a first amino acid sequence at least 95% identical to a second amino acid sequence selected from the group consisting of:
(a) a full length polypeptide of SEQ ID NO:Y or a full length polypeptide encoded by the cDNA Clone ID in ATCC Deposit No:Z corresponding to SEQ ID NO:Y as referenced in Table 1A;
(b) a secreted form of SEQ ID NO:Y or a secreted form of the polypeptide encoded by the cDNA Clone ID in ATCC Deposit No:Z corresponding to SEQ ID NO:Y as referenced in Table 1A;
(c) a polypeptide fragment of SEQ ID NO:Y or a polypeptide fragment encoded by the cDNA Clone ID in ATCC Deposit No:Z corresponding to SEQ ID NO:Y as referenced in Table 1A;
(d) a polypeptide fragment of SEQ ID NO:Y or a polypeptide fragment encoded by the cDNA Clone ID in ATCC Deposit No:Z corresponding to SEQ ID NO:Y as referenced in Table 1A, wherein said fragment has biological activity;
(e) a polypeptide domain of SEQ ID NO:Y as referenced in Table 1B;
(f) a polypeptide domain of SEQ ID NO:Y as referenced in Table 2;
(g) a predicted epitope of SEQ ID NO:Y as referenced in Table 1B; and
(h) a polypeptide of SEQ ID NO:Y, wherein the secreted form or the full length protein comprises sequential amino acid deletions from either the C-terminus or the N-terminus.

12. The polypeptide of claim 11, wherein said polypeptide comprises a heterologous amino acid sequence.

13. An isolated antibody that binds specifically to the isolated polypeptide of claim 11.

14. A recombinant host cell that expresses the isolated polypeptide of claim 11.

15. A method of making an isolated polypeptide comprising:
(a) culturing the recombinant host cell of claim 14 under conditions such that said polypeptide is expressed; and
(b) recovering said polypeptide.

16. The polypeptide produced by claim 15.

17. A method for preventing, treating, or ameliorating allergic or asthmatic disorders, comprising administering to a mammalian subject a therapeutically effective amount of the polypeptide of claim 11.

18. A method of diagnosing allergic or asthmatic disorders in a subject comprising:
(a) determining the presence or absence of a mutation in the polynucleotide of claim 11; and
(b) diagnosing the allergic or asthmatic disorders based on the presence or absence of said mutation.

19. A method of diagnosing allergic or asthmatic disorders in a subject comprising:
(a) determining the presence or amount of expression of the polypeptide of claim 11 in a biological sample; and
(b) diagnosing the allergic or asthmatic disorders based on the presence or amount of expression of the polypeptide.

20. A method for identifying a binding partner to the polypeptide of claim 11 comprising:
(a) contacting the polypeptide of claim 11 with a binding partner; and
(b) determining whether the binding partner effects an activity of the polypeptide.

The application's sequence listing, which the Patent Office published only in electronic form, follows.

SEQUENCE LISTING (652 sequences)

SEQ ID NO: 1 - DNA, 733 bp, Homo sapiens
gggatccggagcccaaatcttctgacaaaactcacacatgcccaccgtgcccagcacctgaattcgagggtgcaccgtcagtcttcctcttccccccaaaacccaaggacaccctcatgatctcccggactcctgaggtcacatgcgtggtggtggacgtaagccacgaagaccctgaggtcaagttcaactggtacgtggacggcgtggaggtgcataatgccaagacaaagccgcgggaggagcagtacaacagcacgtaccgtgtggtcagcgtcctcaccgtcctgcaccaggactggctgaatggcaaggagtacaagtgcaaggtctccaacaaagccctcccaacccccatcgagaaaaccatctccaaagccaaagggcagccccgagaaccacaggtgtacaccctgcccccatcccgggatgagctgaccaagaaccaggtcagcctgacctgcctggtcaaaggcttctatccaagcgacatcgccgtggagtgggagagcaatgggcagccggagaacaactacaagaccacgcctcccgtgctggactccgacggctccttcttcctctacagcaagctcaccgtggacaagagcaggtggcagcaggggaacgtcttctcatgctccgtgatgcatgaggctctgcacaaccactacacgcagaagagcctctccctgtctccgggtaaatgagtgcgacggccgcgactctagaggat

SEQ ID NO: 2 - protein, 5 aa, Homo sapiens
  Site (3): Xaa equals any of the twenty naturally ocurring L-amino acids
WSXWS

SEQ ID NO: 3 - DNA, 86 bp, Artificial Sequence
  Primer_Bind: Synthetic sequence with 4 tandem copies of the GAS binding site found in the IRF1 promoter (Rothman et al., Immunity 1:457-468 (1994)), 18 nucleotides complementary to the SV40 early promoter, and a Xho I restriction site.
gcgcctcgagatttccccgaaatctagatttccccgaaatgatttccccgaaatgatttccccgaaatatctgccatctcaattag

SEQ ID NO: 4 - DNA, 27 bp, Artificial Sequence
  Primer_Bind: Synthetic sequence complementary to the SV40 promoter; includes a Hind III restriction site.
gcggcaagctttttgcaaagcctaggc

SEQ ID NO: 5 - DNA, 271 bp, Artificial Sequence
  Protein_Bind: Synthetic promoter for use in biological assays; includes GAS binding sites found in the IRF1 promoter (Rothman et al., Immunity 1:457-468 (1994)).
ctcgagatttccccgaaatctagatttccccgaaatgatttccccgaaatgatttccccgaaatatctgccatctcaattagtcagcaaccatagtcccgcccctaactccgcccatcccgcccctaactccgcccagttccgcccattctccgccccatggctgactaattttttttatttatgcagaggccgaggccgcctcggcctctgagctattccagaagtagtgaggaggcttttttggaggcctaggcttttgcaaaaagctt

SEQ ID NO: 6 - DNA, 32 bp, Artificial Sequence
  Primer_Bind: Synthetic primer complementary to human genomic EGR-1 promoter sequence (Sakamoto et al., Oncogene 6:867-871 (1991)); includes a Xho I restriction site.
gcgctcgagggatgacagcgatagaaccccgg

SEQ ID NO: 7 - DNA, 31 bp, Artificial Sequence
  Primer_Bind: Synthetic primer complementary to human genomic EGR-1 promoter sequence (Sakamoto et al., Oncogene 6:867-871 (1991)); includes a Hind III restriction site.
gcgaagcttcgcgactccccggatccgcctc

SEQ ID NO: 8 - DNA, 12 bp, Homo sapiens
ggggactttccc

SEQ ID NO: 9 - DNA, 73 bp, Artificial Sequence
  Primer_Bind: Synthetic primer with 4 tandem copies of the NF-KB binding site (GGGGACTTTCCC), 18 nucleotides complementary to the 5' end of the SV40 early promoter sequence, and a XhoI restriction site.
gcggcctcgaggggactttcccggggactttccggggactttccgggactttccatcctgccatctcaattag

SEQ ID NO: 10 - DNA, 256 bp, Artificial Sequence
  Protein_Bind: Synthetic promoter for use in biological assays; includes NF-KB binding sites.
ctcgaggggactttcccggggactttccggggactttccgggactttccatctgccatctcaattagtcagcaaccatagtcccgcccctaactccgcccatcccgcccctaactccgcccagttccgcccattctccgccccatggctgactaattttttttatttatgcagaggccgaggccgcctcggcctctgagctattccagaagtagtgaggaggcttttttggaggcctaggcttttgcaaaaagctt

SEQ ID NO: 11 - DNA, 459 bp, Homo sapiens
ggcacgaggaagcgtgaaccccagggaacagcgggtcccttccctcctcagacacaagccacctcagcttgtggctcttggcccccagccccaccaacccacctgttcatttattcaacagacaatgacagctgatatttattggacatttgcaccatgccaagcattcggcttggattatcccatttgtttctcacagccggtatttattgtctgctcctctgtgccaggtgctgtgctctgggcaggggcactgcatgggctgcctgccctggtggagcttgtggtctgatgggtgaggctgacccaagcccaccccattgccaacagggccagggcaagagtacacacaggggcctcataccatatgtctaaatatttaaaaagttatcaatcaagctaacaactgttaaataaaatatgttctattctcctactttgaaaaaaaaaaaaaaaaaa

SEQ ID NO: 12 - DNA, 540 bp, Homo sapiens
  misc_feature (341)..(341): n equals a,t,g, or c
  misc_feature (378)..(378): n equals a,t,g, or c
  misc_feature (425)..(425): n equals a,t,g, or c
  misc_feature (450)..(450): n equals a,t,g, or c
gaggatccccacagggcccctctgtagccctggggagtcggcagtgctggtctaggccccttaggagagggggcaggggggcagcagtagaaatgtggcggggtccgacttggtgtttccggccgtctttgtgtctrtgttgtgtatgtggagtgtcattcggtctttatgtccctcacggcttcagtctctccatgtgtgtttctgccccaggctctgcctggctgtcccttgtgtattccatctgtctagcccgtggttccatgtcagamcggstttcttctcgggamagcctggttgcatctggggcatctgttttgttggtttgcttctgggtgcangcagacccaggagtgggtgtctctgttccccgagcanctgtctctggtctctggtggtgtgtgagtccatctgcctgcctcganttggccccaaccaagccccccccanccctctctttctctctctcaatcttccctttctcttccaacccctccaaatgagatggttgagtgccgtgggttggagggaagcaatggt

SEQ ID NO: 13 - DNA, 888 bp, Homo sapiens
gcttaggtaccagttagcgtcaggggagctgggtcaggcggtcgccgggacaccccgtgtgtggcaggcggcgaagcgctctggagaatcccggacagccctgctccctgcagccaggtgtagtttcgggagccactggggccaaagtgagagtccagcggtcttccagcgcttgggccacggcggcggccctgggagcagaggtggagcgaccccattacgctaaagatgaaaggctggggttggctggccctgcttctgggggccctgctgggaaccgcctgggctcggaggagccaggatctccactgtggagcatgcagggctctggtggatgaactagaatgggaaattgcccaggtggaccccaagaagaccattcagatgggatctttccggatcaatccagatggcagccagtcagtggtggaggtgccttatgcccgctcagaggcccacctcacagagctgctggaggagatatgtgaccggatgaaggagtatggggaacagattgatccttccacccatcgcaagaactacgtacgtgtagtgggccggaatggagaatccagtgaactggacctacaaggcatccgaatcgactcagatattagcggcaccctcaagtttgcgtgtgagagcattgtggaggaatacgaggatgaactcattgaattcttttcccgagaggctgacaatgttaaagacaaactttgcagtaagcgaacagatctttgtgaccatgccctgcacatatcgcatgatgagctatgaaccactggagcagcccacactggcttgatggatcacccccaggaggggaaaatggtggcaatgccttttatatattatgttttactgaacttatggaaaattgaaccaagt

SEQ ID NO: 14 - DNA, 654 bp, Homo sapiens
  misc_feature (613)..(613): n equals a,t,g, or c
  misc_feature (623)..(623): n equals a,t,g, or c
ggtcgacccacgcgtccggtcatggccatccagagcctgcacccttgcccctcagagctctgctgcagggcctgcgtgasyttttaccactgggcgatggtggctgtgacgggcggcgtgggcgtggccgctgccctgtgtctctgtagcctcctgctgtggccgacccgcctgcgacgctcccgaggcggagaacaccgaacacccagtgaaggtgaggggatcagcacggcgccgccaccgtgctggaacgagactcagccacaaggaggtgcgaagctctgacccaggccacagtgcggatgcaccttgaggatgtcacgctcagtgagagacaccagacacagaagggtacgctgtgatcccacttctatgaaatgtccaggacagaccaatccacagaatcagggagaggattcgtgggtgccgggactggggagggggacctgggggtgactaggtgacataatggggacagggctgccttctgggtgatgagaatgttctggaatcagatgggatggctgcacggcgtggtgaaggtactgaacgccacctcactgtaagacggtagattttgtattttaccacaataaacaaaacaaaacaaaanmaaaaaaaanaaaaaaaaaaaaaaaaaaaaaaaaaaaaaaa

SEQ ID NO: 15 - DNA, 1445 bp, Homo sapiens
ggcacgagggatttgaacaagatcattagaattcaaaaaacaccagaaatgaaagatctttcctgaagctgtttaggaatattcatgatatacccttaactgttctagagaacaaaatgcgtctgtgctccttcacaaaagtccctatgaatttgtttctcaatgtgatccttcttaagttctataactttttgttttcattaattttaggaaaatcctgccttgcttcgttgggcctatgcaagaacaataaatgtctatcctaatttcagacccactcctaaaaactcactcatgggagctctgtgtggatttgggcccctcatcttcatttattatattatcaaaactgagagggtaagtattcagaccagatgtttagtatttgagtgataggttcactttctagggaccagctgcagctccttctcttgaagattgccaccagtgcccctcccaccttggggctgtcctctgccttcccttcctctcttcttttatctttattcctttccagcaggagttaaaacagaaagttttcagtcacctttgtctatttttgttagttcatttgttttttaaaaagatgatgtttattgggttaagtattagcagaatacataaatcatttagtacgtttcctgtttgcgtgaattctatttatgttggtcacattttgcaaattaatgttaaaacctattaatactctacgggacagagaagcacaagctgcctgtgtggggaatagctgccgtcagcagcctgggtatatgattggagagaaagtcaagctgatctttggcaccaaaccattccacatctggtactaaaccctgagctgcagcccccaggcttgtgttgccactggagcccactcgtctagctttgtctttaactggcccatctgcattcccattagagttcgtgtattttgattatctggtgaatgatctacttaacagaaaggtagtccacattttcccagaaagtgtttgcattttgctttcaatatatggttttatgggataatatatttctaatgactaaaatgtgagtaagatgtttttgaataggagcattttcttactgtgtctttagttcctcggattactgtttcttcgcacactccctgggctttagacagtgggattgcaattaggtttggagtgtttcattctgtttgtcagttgtacggtgggttgtgccaaaatgcagtttttcttaccttttttatttatttatttttatctaatatagccaactggcagaatatattgtctttaatgtactttttttctgtctttacaggataggaaagaaaaacttatccaggaaggaaaattggatcgaacatttcacctctcatattaagtctggcaatgatgactatatgtattcctgcctaaataaatcatctattaatcattaaaaaaaaaaaaaaaaaa

SEQ ID NO: 16 - DNA, 1722 bp, Homo sapiens
ggcacgagccagagcaggctgctaggcctggggccaccactgcccctgggtgctacacccagtgtgctgggtcactgggaacttcctgaagtggtgtcacctgaactgggcccccaaggatggggtgcgggcagtaccgcaggaagaggagcagcccctgtgaagattgagagctgccagaggctctgtgattggctgcggcacgatgacccgcgcacggattggctgcttcgggccggggggccgggcccgggggacagaatccgcccccgaaccttcaaagagggtaccccccggcaggagctggcagaccyaggaggtgcgacagacccgcggggcaaacggactggggccaagagccgggagcgcgggcgcaaaggcaccagggcccgcccagggcgccgcgcagcacggccttgggggttctgcgggccttcgggtgcgcgtctcgcctctagccatggggtccgcagcgttggagatcctgggcctggtgctgtgcctggtgggctgggggggtctgatcctggcgtgcgggctgcccatgtggcaggtgaccgccttcctggaccacaacatcgtgacggcgcagaccacctggaaggggctgtggatgtcgtgcgtggtgcagagcacsgggcacatgcagtgcaaagtgtacgactcggtgctggctctgagcaccgaggtgcaggcggcgcgggcgctcaccgtgagcgccgtgctgctggcgttcgttgcgctcttcgtgaccctggcgggcgcgcagtgcaccacctgcgtggccccgggcccggccaargcgcgtgtggccctcacgggaggcgtgctctacctgttttgcgggctgctggcgctcgtgccactctgctggttcgccaacattgtcgtccgcgagttttacgacccgtctgtgcccgtgtcgcagaagtacgagctgggcgcagcgctgtacatcggctgggcggccaccgcgctgctcatggtaggcggctgcctcttgtgctgcggcgcctgggtctgcaccggccgtcccgacctcagcttccccgtgaagtactcagcgccgcggcggcccacggccaccggcgactacgacaagaagaactacgtctgagggcgctgggcacggccgggcccctcctgccagccacgcctgcgaggcgttggataagcctggggagccccgcatggaccgcggcttccgccgggtagcgcggcgcgcaggctcctcggaacgtccggctctgcgccccgacgcggctcctggatccgctcctgcctgcgcccgcagctgaccttctcctgccactagcccggccctgcccttaacagacggaatgaagtttccttttctgtgcgcggcgctgtttccataggcagagcgggtgtcagactgaggatttcgcttcccctccaagacgctgggggtcttggctgctgccttacttcccagaggctcctgctgacttcggaggggcggatgcagagcccagggcccccaccggaagatgtgtacagctggtctttactccatcggcagggcccgagcccagggaccagtgacttggcctggacctcccggtctcactccagcatctccccaggcaaggcttgtgggcaccggagcttgagagagggcgggagtgggaaggctaagaatctgcttagtaaatggtttgaactctcaaaaaaaaaaaaaaaaaaaaaaaaaaaaaaaaa

SEQ ID NO: 17 - DNA, 2321 bp, Homo sapiens
  misc_feature (787)..(787): n equals a,t,g, or c
  misc_feature (880)..(880): n equals a,t,g, or c
gtgaaagtgggccttggaaaaakttctgaattaaagaaaagctgcatgtgcacggaatgcagtgtgatacattctctaaagcaacatgttgtaaaattttactgctttcttgttgtgttttatatcttgttttctccaggcttcgtggactcgaccagagaagcaagaggtatagcttacctgaccactagccagtctttagttttgaaagcattacagtttaactcaccattgcagtttaataaccagacatgctaaactaattagtaatttagctaaagaataggtcgatagtggtagacattacttagcaatagtatcatttaggatgagcaagcaagctgtgttgggagtggatgaacaaatccatattatttcctaaaactggatcttattctcttgctggtgctggtaaaatcacatccaggtaattacaccaatagaaataaattgcccccaattcccaggccaggcattttgaaatggtgaaagttttttgactcacatggttgatgtggctctggaccataaagtcacagagttagtgatctaaaaacccactcctccctttcctttccagctcaactcatcttgttgctcacttattttataatgatcagtcttggtaaattatcacatcacgtttcatctcaaaagcaatgcaaatgacatctctcgttggttttcccaaattgctaaacgtatctctgttacttttatagagcatyaaatttatgagattagaatgatgtggtacaaatggttttatgttttttaaagtcagtancatttaacctttgaaatttctctgactcattgcttcagtttggataatgtgggacttartttgaaaactgaarttaagtattaatctttaggntttgattgccacatctcaagamcctacttatgatcatgamtataattttttacccgatttatatgaagtaacatatagtgaaaatgaaaccagtggacttcagatgagattcaaggatctaatctctaaggacttttttaaagttgcctttgccttttatccagatggggctttgatcgtgtaatgctataaatgcagaacatcatgatcctatagattctgtattttaatttggtaaatctatcccttagtctttcmgaaatgataaytattcagaacgtataactcaagtgttcaggtcaaggytatacatatttatatgctgtttaatatttaaaagttgactgcctgtccccaggcactgatcttagtttctgcmcatgaacaggctgccattgtcmaattcarttcmttataaacttccygtgtwtaagactgtcctcccygtcattgggatgactgttaagtgcacagcctcactgagaggcttcccscctgtggcacaggaatcacttagtgctgtcacaggttgggtgctttattgtccaaaagtcatggacccactgggattggggaagagagagaagggttaattatcagccaytcttaagcagctacagatctcattctgcttgccttcatacaactttccttgtcattctcatttagagctggttgaggaggagctgagatttatcagggagcattaaggagatgttaagagaattattattgtaagtggaagtaataggtttactcccatgaaagcagacacctcactctgtttttcagaagtgtccttatcatgagtgtcttactttggacgtaattgactttcaagtgaatgctgcccctagggctcagaagttccattctctcctgtttgtctcatttggagatgaagaccataagtccagatgagtgcaaaagaaggctcaggttatggccaatttcattttgtaagttctaaaagcattagcacttttacctggaaggagggagacaaaaacattttgatgagaagaataattatcattaaccttcatatttttggggaaaaaaggagttttcttgccatcaatatcttttcatacttgcccagagctcatctcctccttctgctgcagcctgggtggtcagcatgactttttgtctggatggctggtaggtggcacaccctgaagttgtgcaggagccatagtaaaagcatttcaggggaagatagtctaatgacactggagtctatctgtgtatcctcaaagggagaactgggcatctggcagataattccatcatcaaatctgtagtgagcctactgcaaaataagaattctctttagaaggctggtctgtggacatcattaaacaggagaaatttccacatggagaaatttcctgaaagaaactagataggaattaaaaaaaaaaaaaaaaaactcgta

SEQ ID NO: 18 - DNA, 1256 bp, Homo sapiens
ctatgttccatcattccttcccaaagccaccggaagcattccttctaggaaaggtggagtcggtagtgagaagccggaggtgcccctacagacatacaaggagattgttcactgctgygaggagcaggtcttaactctggccactgaacagacctatgctgtggagggtgagacacccatcaaccgcctgtccctgctgctctctggccgggttcgtgtgagccaggatgggcagtttctgcactacatctttccataccagttcatggactctcctgagtgggaatcactacagccttctgaggagggggtgttccaggtcactctgactgctgagacctcatgtagctacatttcctggccccggaaaagtctccatcttcttctgaccaaagagcgatacatctcctgcctcttctcggctctgctgggatatgacatctcggagaagctctacactctcaatgacaagctctttgctaagtttgggctgcgctttgacatccgccttcccagcctctaccatgtcctgggtcccactgctgcagatgctggaccagagtccgagaagggtgatgaggaagtctgtgagccagctgtgtcccctcctcaggccacacccacctctctccagcaaacacccccttgttctacccctccagctaccaccaactttcctgcacctcctacccgggccaggttgtccaggccagacagtggcatactggcttctagaattcctctccagagctactctcaagttatatccaggggacaggcccctttggctccaacccacacgcctgaactttaaggatcattggactatcttctctgtggccagcgcagctctcttctgtgttcacagaatggccactgataggcaygcctcttttcccacccactggaaggctcacaggcaaggtgagagaggacacagaaggtgccaacactgtcgctacagtaaggacctgaagtgactttgagaaattcaccctcacaaaccttccttcaggagcaggcattggtagtgcagaggcacagattccgtcctttaccagctgcagaatcttgggcaagttacatagcctctgtgagcctcatcggtaaacagtgggggttatgaaacccacctcacagggttgttgtgaggatccaatgagttgatttaggtaagcacctagcacatgccgtggcaccaagtaagcactcaataaatcactcaactccttaaaaaaaaaaaaaaaaaactcgag

SEQ ID NO: 19 - DNA, 752 bp, Homo sapiens
actgaacagtggttaatcctgactctgtttttgactgacagttaacagttacatgaaccattcatattacagctcttacttaaatttgaccaagccaggatatatctgttaggccacattcatttagggatcatgttttccaaagcaggtttgggcaaaattaatccacaggactgaaaggtatacatctgtgagttttgttctcacttccacctctaatttgaagaacactttaattgacacagaatacatttcacatatttaacctctacaataagttctgacacattttccatgaaacaaaccatcgctatattcaagataatgaacctatctatcatactcccaaattccttctkgcatctttgtaatttctcactcttccttctccctctccccgtcccatcccaaccactgatctgctcaggcaactaccaatcttctttctgtcactatagattaatttgcatttttaaagaaatttacatacatggaaccatacatcatctatgctttgtagtatgactcctgtcactcagtacaattattttgagattcatttatgttawtgtatgtatcaatagttcatcccttttattggtaagtaacatttttttgtataggtataccatgatttgttgatgaacaaatttacctgttgatgaacatttacgttgttaccaagatttttgctattgaaaataaagtttttatgaatatttatatatataaaaaaaaaaaaaaaaactcga

SEQ ID NO: 20 - DNA, 2761 bp, Homo sapiens
  misc_feature (1006)..(1006): n equals a,t,g, or c
  misc_feature (1376)..(1376): n equals a,t,g, or c
  misc_feature (2211)..(2211): n equals a,t,g, or c
gattaaaatttatttaataataaggggaggaataaaataactatgcatttttttgttgaaagcacaattgtgtctgatactttaattacactatctaatttaacctttcataaatgcccagaatatgagaatatcatccaagatttaaataccaattaccaaaatttacagctatcaaatggaagactcaggtttatgctatgccacgttttctcttctttcctttttgtgatggtgttccaaattgtggagaaagaaaacattctatttgtgattgcttctgctagttacttctgcaaaacaaactactcaaattcagtggtgtgatgcaataaccatttgtcatcctcatatattctggggtcaggggtcaaaaatgcaaagtggggtgacatctcgtggtctacagtaattggggcctctgagaattcctagctatctaggaatgaattaaacgttggacaatgaagttttctgaaagcttctttacgtttggctcctgcatkggtatgacttaaaggctgcgctcaaaataatctcttaaccagagkgtctgaatattgcttcttcatgtaacttgagcttcctcacaacatggaatcatacaggtagcttgcctgagtgttgcagttaatgggtcaatgtattgcctttaataatcttgcctcagaagtcacatagaattactttaatgctgagttggtttaagcaatcacagcctgtctgacttcagggggaagaaacatgatgtctaccctttgatgtgaggacattcaaagtattcgtggctaymttttaaaaaagccacagttatcttctttttaaagagatgccatatccttattatcagcaatagaatcaggatttgaaaatagttcttatgctacatatgcattttttataatcattctttctattataatctttttcagaaagggtgaaggggtaaggattatgtttcatactttgkgaaattctgkgctctataagcatttttattttttgnccataatagattatggtacaaagtaactcaaaactagagtgtataaacataaaaaatacaagttttcatatccaagctgtggataagatattcaaatataaaaaagattgtgaatttgttttaaaaagtcttctaattttgtaaaaagamctaagataattgtccactaatcactcattaaatctcctccttagttctacttccacaaaagctattaccatctatgattaatttggatttcagaggaagaaaatacagtttgaggaaaatggattgttggagcaatctcaatgttaactacataaaatagcttattacttgaaaaatgaggatattgtatgaattttcgcaagtcaattggtagcaaaancgacatttaagtgattgtaaatatgtcatatataaaactatcttgtaaagatgttacagagatattatatgttactagcttctggattcagaaaaataactggaacagatttaagttgggtaattgtagtgtgtctaataattttaatacaaggtaaaaacattttctgttgaaaatcagttttaatattgtttggttttatttatattttgaaaatttaaggattcttgaatattcttaagtaaattgcaatttaatgcaattgtagttatactcagtaatatagttacmcttgattraagccattataaaggaaatgtaatcccatactgattatcttcacatttcttttggttaaagatcagtctatttcattgagataacagttcaggagaaaagttattgactacatgtatctatagtattgtctaagcaacaggagtttagtttgcatgttttttatttttgagagtacatcaacgtaatgaaatgtatttaaaattgtacccatatatacataatgatatatatatatatttatgttttmcagcagtgtttttccttggagatgattcaatcaaattgcaaagrggcacttctaattaattattgggaagtmcaagctaggaytattgttttcctgaacgtttgtgmcttgtagtgatctcttmcagacgtgggggtctggmcacttggaccttaaattggaaatggttaaaaaattgttatccaaagaatgacaatggtttgtttgccaagtctttttgttttgttgtgttttgttttttgagacggaatctgtcaccctgcactccagcctgggtgatagagtganactccgtctcaaaaagaaaaaaaaaaatcaacacctaaaaatttactttcttctagtcaatttatttcgatgtgcatcataaattaataacaaaaggggtagatattttattgagctatggttcctgaatcaaaaccacaatctggaggtttccgtctcttcataaaagaagttaaaactcagtgcatgttgctagacgtcatttaatgatcttcattcttctctgtccagagcatgtgtgaagtattaggccagaaagagagagataaataatcttttcccatgcacccctgctggtcacagaagctggctctttaaagtttgagtaactgtcactttgtcaggcatggttataaagtttccagaaagaactagtaaggagcattaatataagatttccccagatgccaattttgttttctgctatatctcactcctctttgaatttcctcatacaattttccatttaaaatggagaattcagctttcttgatcctataataaacacatttgtctttatttgatacaaaaaaaaaaaaaaagkgcggcc

SEQ ID NO: 21 - DNA, 2534 bp, Homo sapiens
cccgggtcgacccacgcgtccgggacgcgccgtggacccgcgtgcggacggcggggacaggctccggtgctgagcgcctccggtgtccccagcagcactgacccacttgcaggccccggagctgagccgccagccatggccgctccccgcgggagggccgcgccctggacgacggccctgctgctgctcctagcctcgcaggtcctgtctccgggaagctgcgcggacgaggaggaggtccccgaggagtgggtgctcctgcacgtcgtccagggccagataggcgccgggaactacagctacctgcggctgaaccacgagggcaagatagtcctcaggatgcgcagcctcaagggagatgcggatctgtacgtctccgccagcagcctgcaccccagcttcgacgactacgagctgcaatcggccacctgcggcccggacgccgtgtccatccccgcgcacttccggcgcccagtgggcatcggcgtctatggacacccctcccacctggagagcgagttcgagatgaaggtgtactacgacggcacggtcgagcagcacccgttcggcgaggccgcctaccccgccgacggcgcagatgccggccagaagcacgctggtgccccggaagacgcctcgcaagaggaggaatctgttctctggacgatattaattagcattttgaaactggaacttgaaattctcttttgagtcgttgaccacactctgggatataaaaccctccatctgtgaagctgattgcagtttgctgtgaaccttgctacttgtacttggttgaagttctaggtacctttagtcaagggatggaaaaataaagccatacgcagttttgttacctcagttaccccaaaaataggaaaagcagcaagcacagtattttaaagatcataattcctataaaaggactgtgcacaaagtgtttagactccattttcattaggcaggttgactaaaaatgattgcagtaacaggtttatataaaatagagcaacctttcatgctgtgacacaaatcaaaaggttgataactttgtaattttactctggagattctaaccgaagttggtgtaagttttcaagagttactaaaatcaagttggaaatgatttacgtacacttccctgagcctggactaaagcctcatgcctgtaccccaagtaggtgatggtacttttctatacaaaaaggatttcctggcaggcaggtatttacaaagtttgttcctgtaccagtccaataatgacaactctaaatccagctgcaccaaatcttagtgggccatttgtcatacctatgaaaattcttcagttattaaataactttgtcagtgctacctatggtaggccggaaacaatgtagattaggaagtttcatgaaaattaacttttggggctatggagaaacagttaagtatcttaagttactaaacatttccactgaatttttggagtgagccaaggttactataaaatactttggaagatgaattctctacctggagttagtttcgagagtaagcgtagcttttaacagaaataactgcagattttaagctaataatttgcaaaaaaaatcttttattggcatgaaaataatgttgtaaatggcaccaaatattccacttaaatgcatatacagtattagagtcaaaaactattttatccctctttgctgtttttcccccttctgcccactttcctgggtgttgggggggcccgctgacaacagtcacaaatccagcgacctaggaaaaaaattgttaatatagaatgaaaaattatctttacaggactgaattttaagcccatctaaactcttctgccttagctatcactaatgatattcctctctggattttgtggtgagaagggcactatgagttccttaatttaaggaaaaaatgtaaacttaatcaatgtaatcaatgccatgcaaaattcattgcaagtcaagggggatgggagagatgcaatgccatacggtgatacggacctttaagaaagtacaatctttcctgaaattcaaacactatcatacttcaaaaggtcaaaacccattccggaaattggcttttttaagactttttctctcctgctcactggcagctgtgtgtcttaacagcattctttcaagtcctggtgtactctgctgacagcactttaaaactttaacagcacaatgataacttgtactacatacttgatctgaattactacagaaaaataattatgttgcttgcttaatgattcccaggaaacttcgttgtaggcatatattttataagagtattatacagtgttaactatgcaagtaagttctaaaattacacaattatctgtgtaatgttttagtccaattactgtgatttattcaactctgttctaaagttatctggaattgtcatgctgcctcaatttacagaaatctataatagatttctatagaaatgtaaaaaaaaaaaaaaaaaaaaaaaaaaaaaaaaaaaaaaaaaaaaaaaaaaaaggaaaaaaaaaa

SEQ ID NO: 22 - DNA, 1280 bp, Homo sapiens
ggcacgagtataaaggcccctccacccagcctctagcccatttctttctctggcttttgcaggattcctcattctccctgaggtcttaactatcacatcatgcacgttctgccactgctgttatcactgctgctgctgctgctgctgctgtcagctagctttgtgactttcagcacccccacttccagcagaaattctagctgccctgattgtgagagtctgaacaccggtcttccatccctgatgatgtttggtggatctctgctcaaatgggttcagaacacacacggggtggaatcactcttgtcctctgccaaggtgcgcctgcttccaccagccctaggggttctgttcccaagactacaccctggcactctgacccttgtcttccttttaattcccttcctcacagtgtcttcttccacatctgacgttcttagctctttagagtccccaaaactatctgttaccatatttcattattgttaactctaaagattttggcatcaaacaccctgcatttgaatgctagctgtgtcacacatcagatgctttactttggcaaatcatagaactttctgtcaatagggataataatggtacctatattgtaatattgtgagtgttacttggataataaagtacatagcacagtatttggcacatagtaattgctcaacaataccaattgttattattattagactgtgccctctaaattatttgtctacggattatgatctgtataaatgacttatcaattaagaagaccacaggtatgcagagtctcatcactcatacaagactgatgtcaattaactaagagaagtttcgtcactaaccaggagtttcacatcatagttccacactttgcttctactcccaatatggcttgttgacttttcactctctttaccctgttttctttctatggttcccagggctatcacttttctttattttggttaatacatatagctgtacactgacccagtctccatgaaaaatactgtcatatactccctctttccctctttccctaatatcatcatctcatagagatcaaactcacattttctggcaccattattctttttataaaatactttacttttaaatttttacccaactacgtctatgttattttagctagctaagctgctataacaaagagatctaaatacagtggcttaaatataacagaagcatatttttctctcatgtaacagctagaggaatgtgtgtagtccagagcatacaaaccacaagtcattcatgac

SEQ ID NO: 23 - DNA, 1355 bp, Homo sapiens
ggagtcctgatcaagtgatacaaatgagctgcaatggtgacataaactcttgacagagattggaaaagtagctggaacaccatcttttcttttaactttttatggtgcttctgttggcatagttggggaaagcacctacaacatgagttttatcatgaagcttcacagacactttcaaagaacagtcattctgcttgccactttttgtatggtgagcattatcatttctgcttactacctgtacagtggctacaaacaggaaaatgaactctctgagacggcttcagaagttgactgtggcgacctccaacacctaccatatcaactaatggaagtgaaagcaatgaagctttttgatgcctcaaggacagaccccacagtcctagtatttgtagagagccagtactcatctcttggtcaagacatcattatgattctagaatcaagtagattccagtatcacattgaaattgcccctggaaagggagatctcccagtgcttatagacaaaatgaaaggcaaatacattctcattatttatgagaatattttaaagtatataaatatggattcctggaatcgaagccttctagataaatactgtgtagaatatggtgtgggtgtcattggattccacaaaactagtgagaagagtgtacagagctttcagttaaaaggtttccctttttccatatatggaaatcttgcagtaaaagattgttgtattaatcctcattctccattgattcgtgtgaccaaatcttccaagcttgaaaaaggttctttacctggaactgactggacagtttttcagattaatcattcagcctatcaaccagtaatatttgccaaagtaaagaccccagaaaacctttctccttccatctctaaaggtgctttttatgccactattatacatgacctggggcttcatgatggaattcaaagggttctttttggcaacaacttgaacttttggctgcacaagctcatcttcatagatgccatctccttcttatcagggaagaggctgacattgtccttggacaggtacattcttgtggatattgatgatatatttgtgggaaaagagggaacaagaatgaacaccaatgatgtaaaggtaaggctctattttctcaagtttcaaagttcagttcatcttccagcagggatacaactatcccagtttgtactacaactgggttacccaggacatgggatttactgggaaagtctgggcaatctaggattatcgctcaccctaaatcaactaagaagattatgtatttctatctgaatcaagaaaaataaagattttactaaaaaaaaaaaaaaaaaaaaaaaaaaaaaaa

SEQ ID NO: 24 - DNA, 1280 bp, Homo sapiens
gggcagacttaactgctgtctgctcagcatggaagccaggagccaaaccagtgggcttgatgacagtgagctatttctggtggctcagggttggggcttgggccgaagatgtggaggccctggcttcccttcctgaggacagactgaggtggaaccttttggctctgccagcttctccatgtgcagtcacagcactggtggcaaggcataggagagctgggctacaaagaagcattcagtgtctcctggggcggcagggaggtgggggttgtaattgtgaactcaccaaaccccaggtgggcagtaagtgggtgggtcataggaagaaaagtgatcttcagtcaggagacttgggttctgggctctgtctgatgactggctctgtgatgtgagccaggtgacttctctaaccctgagttgcctcatctgtaaagataattccagtcttggaggatttttatggasyaaaaaggacagagcggtcctgtgtatcccctgcaaatggttagacgttatccatttacagcccctgccaagccaccactagcttcttcagagaacttttgaaccctgcctccctaaagtagttctaaaacatttttcactgtgttacccatcaagggaaacaaaatgtttctacaaaccatagtaaataggatcgtttttgtattgtgtttcaaggaggaaaagctgaccagcaagaagaacgtcggagacaaaagcagatgaaggttctgaagaaggagctgcgccacctgctgtcccagccactgtttacggagagccagaaaaccaagtatcccactcagtctggcaagccgcccctgcttgtgtctgccccaagtaagagcgagtctgctttgagctgtctctccaagcagaagaagaagaagacaaagaagccgaaggagccacagccggaacagccacagccaagtacaagtgcaaattaactggtcaagtgtgtcagtgactgcacattggtttctgttctctggctatttgcaaaacctctcccacccttgtgtttcactccaccaccaaccccaggtaaaaaagtctccctctcttccactcacacccatagcgggagagacctcatgcagatttgcattgttttggagtaagaattcaatgcagcagcttaatttttctgtattgcagtgtttataggcttcttgtgtgttaaacttgatttcataaattaaaaacaatggtcagaaaaaaaaaaaaaaaaaaaaaaaaaaaaaaaaaammmagggsggcccgggaaccaattt

SEQ ID NO: 25 - DNA, 953 bp, Homo sapiens
ctccaatgtatatttggtttataattttcttcatccagcctcacaaagaggagagatttcttttccctgtgtatccacttatatgtctctgtggcgctgtggctctctctgcacttcagaaatgttaccactttgtgtttcaacgatatcgcctkgagcactatactgtgacatcgaattggctggcattaggaactgtcttcctgtttgggctcttgtcattttctcgctctgtggcactgttcagaggatatcacgggccccttgatttgtatccagaattttaccgaattgctacagacccaaccatccacactgtcccagaaggcagacctgtgaatgtctgtgtgggaaaagagtggtatcgatttcccagcagcttccttcttcctgacaattggcagcttcagttcattccatcagagttcagaggtcagttaccaaaaccttttgcagaaggacctctggccacccggattgttcctactgacatgaatgaccagaatctagaagagccatccagatatattgatatcagtaaatgccattatttagtggatttggacaccatgagagaaacaccccgggagccaaaatattcatccaataaagaagaatggatcagcttggcctatagaccattccttgatgcttctagatcttcaaagctgctgcgggcattctatgtccccttcctgtcagatcagtatacagtgtacgtaaactacaccatcctcaaaccccggaaagcaaagcaaatcaggaagaaaagtggaggttagcaacacacctgtggccccaaaggacaaccatcttgttaactattgattccagtgacctgactccctgcaagtcatcgcctgtaacatttgtaataaaggtcttctgacatgaaaaaaaaamaaaaaagggcggccgctctagaggatccaagcttacgtacgcgtgcatgc

SEQ ID NO: 26 - DNA, 1404 bp, Homo sapiens
tacgagtttttttttttttttttttttaaaggagagggtgcaatgatgctccctagctagtaagagtcccatcttggccttctaagggaaagataggtaaatgaaaagactgctaaatccaaggtcagacagcatatagaaggctttataaaagaacaggaaaactcagaacactaaataagagagtgctttcttggactctgcagttggcctcaatcatcggatctggaatattactttttacgattttgsaagccgatacacacctgtaagtaataactgaggaaggtagagtatgattagtctttttacctttcagtgtgtatcaatgttaagtgaacaagagcmaaaggaaaaccatatatttagtattttgcaacatatataaaataacaacactgggctgggcgtggtggytcaagcctgtawtcccagcayttkgggagccgaggcagggggatcacaagktcaggagtttgagaccagcctgsccaacatagtgaaaccccgtttccactcaaaatacmaaaaattagtcgggcgtggtgatgggcacctgtaatcccagctactcgggaggctgaggcatgatgatcgcttgaacctgggaggcagaggttgtcgtgagccgagattttgccactgcacaccagcccgggaaacagtgcgagactccgtcttaacatgaaaaacatgaacagccgctactatctgagggcaattttttgtctttatactttggcatgtatattatttctacaaataattttaaaggccaggtgcggtggctcacgcctgtaatctcagcactttgggaggccgaggtgggcggatcacgaggtcaggagatcgagaccatcctggccaacacagtgaaaccctgtctccactaaaaaacacaaaaaattasccaggtgtttggtggcgggcacctgcagtcccagctastcaggagtctgaggcaggagaatggcatgaacccgggaggcggagcttgcagtgagccaagatggcgccactgagctccagcctgggcaacagagcgagactatgtctcaaaatagtaataataataattttaaaataagggggaaaaaatcactgataaaccaaaaacctcaaccttaagaaacgttcacatctgtatagctaatactctgacgatggggatacaaaaacaccttcactcagtggtcttgcagatatcatttttttcccagtattttttggaaagaaccaatctttgtctttttttctccttcttcagggaactttatgaatccagaaagagccaacgtttgaatgattactgcaatctcacatctattaaatcctgatacctgcaaccaagagatgagtaggagatgtggatcctaagaggtgacctgtaacatactgccccct

SEQ ID NO: 27 - DNA, 537 bp, Homo sapiens
gtccgggggacgtgcacggggccgccctcctggccctgaagctgcgccggcctccctgagcgtttcgctgcggagggaagtccactctcggggagagatgctgatgccggtccacttcctgctgctcctgctgctgctcctggggggccccaggacaggcctcccccacaagttctacaaagccaagcccatcttcagctgcctcaacaccgccctgtctgaggctgagaagggccagtgggaggatgcatccctgctgagcaagaggagcttccactacctgcgcagcagagacgcctcttcgggagaggaggaggagggcaaagagaaaaagactttccccatctctggggccaggggtggagccagaggcacccggtacagatacgtgtcccaagcacagcccaggggaaagccacgccaggacacggccaagagtccccaccgcaccaagttcaccctgtccctcgacgtccccaccaacatcatgaacctcctcttcaacatcgccaaggccaagaacctgcgtgcccaggc

SEQ ID NO: 28 - DNA, 2008 bp, Homo sapiens
cccccgggctgcaggaattcgcaacatcgtccttactcctgcatttttctgacgggcatgctcccacgcagcttgcgcaacaccaagcgggcggtcaaactctcggctcaattgttataagatcacataacaaaactttcatcctggagctctctcatgcgccgtttgctgctcgctttgccgtttgccctgctgccactggctgtcgctcatgctcacgaagaccatgaccacgagcacggcagcctcggcgcccatgaacatggcgtcgggcgcctgaatgccgtgctggacggccaggccctggagctggaactggacagcccggccatgaacctggtgggtttcgagcatgtagccaccagcgccgccgacaaagccaaggtcgccgccgtgcgcaaacagctggaaaatccatcggccctgttcaacctgcccaaggccgcaggttgtgtggtcagcagccaggaactcaacagcccgttgttcggtgacaaaccggaagccgagcatgacgacgatgaccacgcctccgacggcaaaggcgccgccgcccacaagcatgatcacgaccacagtgaaatccacgcccattaccagttcacctgcgccacaccgacagccctgggcaacctggacttgagccaggtgttcaagaccttccccgccacccagaaaattcaggtacaactgatcggcccgagcggtcagcaaggtgttgacgcaacggcaaccgcagccacgctgaagttctgatttgaaacaaggtccatgtgagagctggcttgcctgcgatacaggcgaggcggtgcagcaggcacactgccggatgccatcgcaggcaagccagctcccacagtggatcggcgccattttcgactaccaggcgacactgacttcccatgactcaagcgttaatcgaactgtccgacctgggcttcaactggcccggtcacccgcagttgctggacattcccgcgttccgcctggaacccggggaaaccttgttcctcaagggcccgagcggcagtggcaagaccactttgctggggctgctgggcggcgtgcagaagcccagccagggcagcattcgcctgctcggccaagagttgaccgaactctcggccggcgcccgtgaccgtttccgtgtggaccacaccggctatatcttccagcagttcaacctgctgccgtttctgtcggtacgcgagaacgtcgagttgccctgccacttttccaagctgcgcgcgcaacgggccaagcagcgtcacggcagcgtcgaccaggccgctgcgaccttgctcgcacacctgggtttgaaggacccgagcctgctggaacgccgtgccgattcgctgtccatcggccaacaacaacgggtggccgctgcccgagcgctgatcggccagccggagctggtgatcgccgacgagcccacctcggccctggactacgacgcccgcgaagccttcctgcagttgctgttcgccgaatgccgcgaagcgggcgccagcctgttgtttgtcagccatgaccagagcctggcgtcgctgttcgaccgcaacctgtcgctggccgaactcaatcgcgccgccatgcccgcagaggtttgagatgtatctgttccgtctagccatggccagcctggctaaccgccgctttaccgcgatcctcaccgcgtttgccatcgcgctttccgtctgcttgctgctcgcggtggagcgtgtgcgcgtcgaggcgcgcaacagtttcgccagcaccatcagcggcaccgacctgatcgtcggcgcccgttccggctcggtcaacctgctgctgtactcggtgttccgcatcggcaacgccaccaacaacatccgttgggacagctacgagcacttcgccgcgagccctcaagtgaaatgggcgatcccgatttcccttggcgattcccatcgcggctaccgggtgatgggcaccaacgaatcctacttcgagcactaccagtacgggcgcaagcaaaatctcg

SEQ ID NO: 29 - DNA, 1160 bp, Homo sapiens
  misc_feature (325)..(325): n equals a,t,g, or c
ggtcctatgtgtctataacttatcagattgggagctagcagaaagagataagattattgctatataatttttagggatagacaatttaatttccttggtttcctgtctcatggacctcacttaaccagtagtatgtgggtgttttttctaccttttttctccatcttatttaaaatttgttggtgtatttcccttagtcaaactaaagagaaacaatcatctaatcttatgttttatttcttttgtatatgtacatatgagaggaggaggaagaaagagatgaggagaggtgaaaagaaaagatccttctgcctgattgggcttngccagcatatgatagcagtgcaggcctggttccatgagcagcatcagattcaaatttcatagaaaaagagcccagaggaattgaaaaagagaaattaaattcaacaaggagaggcattgtatacattatgcattcacgataggttatgattgagaagaagctggtgctttgggaaaaacatattaggttctacatttaccctttttgaatagttttctcctttctaaacagggtgataataggagaatgctgaatgcctctccattgaatttggaaactgccgggccagcattagtgtggtattgtctgcccacacttttctagatgcaagtttaagatcatgttcagtgtgaacattgaggactttagagatcggagtccgaaatgtgtcaaagttaatgttaatagatgctgtcctcattttgtaactgtgacttctaaatgtgaccttttagttcatatctcataaatttgccatttaagaagaaatacagawatgaaagtttkaagttttaataaaagtatatcttgctgggtgcagtggctcatgcctataatcccagcactttgggaggccaaggccggcagatcacttgaggtcaggarttggaractagcctggccaacatggcaaaaccttgtctctactaaagatacaaaaaaaataggtgggcatggtggtgcacatccgtattcctagctacttggaaggctgaggcacaagaatcgcttgaacccgggagacagaggttgcagtgagccgtgattgcaccagtgcactccaacctgggtgacacagtgagactgattcaaaaaaaaaaaaaaaaaactcgag

SEQ ID NO: 30 - DNA, 1853 bp, Homo sapiens
  misc_feature (1840)..(1840): n equals a,t,g, or c
  misc_feature (1851)..(1851): n equals a,t,g, or c
ctgcaggaattcggcacgagcacctataaagaatctcaacccacttcccactcaaaagcactgtgtatttctcatggcctgcctgggagcccccatctccagcctgctgtgctggctacttctggcacttatagcccttgagatagtaccgccagcagctccctgtgaagtgctaacaccccttcaaagcagcaccaacccaattgtgaacaagctaggagtaaaagacgtaaatgaattggtcaccccaatgcaggggatacagacttgttttaatataaaaaagaagtggccttaaccgtgcagggcttgcaggcctttgtaggcatgggagcatgctgtgatccctggttctgtgctaaacactcaaaagggctctctgactcaagtggaggtgataaaccttttcaatagtaacaggagagagtgtgatatcaaagtgccmgaasycctcacggaccaacatttagcacagacattcaaactgctgaaagawccaawcagaactcaactgaaaaaaacagaccttttaagaaaagcaatagatcttaatttggtggcaagatccctggtttaccttttgaagtcaaaatgttcaatacatcacccgagcttgacttttgagcacttggcaagattgttttttgccacttgacacaagtatgatgtccagctatgcaaaatgactgtttgatctgccttttcagtgtatttgtgtggcgatgtctgtaaaatgccagaagcctcttatgttattgctgctgctgctaccagccagcaactgcagaggccatgctgaggtgcctccttgccaccagccgttgggaaatgcctaccatgctgccccggatgcacaagctcaaaacgctgcagaagttacacaactgctcccataatctggactctccaaaaccgtgatgccacgaaggaaggtcaagttttaaaatgttaaagactgcttgcctctgttcctgagactaaacagtatacatactaactacattgacaaagaaatcctatctgataatgtagcccgctgacgaattttgaagcctcggttaccctaaccaatatgtagcttttaatttgcatcaaaacttttacaaagatgttttgctattgtttctatatacttcaagaatgttcatttttacaaataagttgaacaagacagcctaagttagatgcaccgaagtactagaaatatcgctagcctctgttctccagtttagctttcaaaaccaaatgagccatgtataaaggagttgagaaacttaatttttaaatgtttcatttgcagagttttatatccattaagtgcctttgaaagtttccagttgtgtgggctgctgtctcacctcccaccaatttctcctttctccttatggtgctaaaacctcaaagctgaggagggctgcaggacccttagcagattcagtgtgtcacccttgtcctgtgttcacgccaaggcttcctaaatgaaagacatcggttacctgcttatgggaagactcttcatgctgatcggatcttgcattgaaataaccatgtggaagaacaatgaatcgattaatgatgacatgtacaaccatatttaaagagcaatagtgtccgtgtgtcatgaaaaacttatttgtaaacgtttatatggtatgattttgattttatgtatgttcataaatcctgcactgtatgatatatgtgagttaaaacattggtgcatgaatttattttcaaagtataaaacacatcacttaaacattttatgtgtcaaataaaatttgattatgtaaaaaaaaaaaaaaaaaactcgagggggggcccggrcccaattcgccanatggagatccnaa

SEQ ID NO: 31 - DNA, 2229 bp, Homo sapiens
  misc_feature (2227)..(2227): n equals a,t,g, or c
ggcagtatataaaatttgtggggcttacagcctcgcccacctgcttcacttctgcagcccacagcatcatattctcgaaaagataaagaccaaaggaagcaacaggcaatgtggcgagtgccctctgatttaaagatgctaaaaagactcaaaactcaaatggccgaagttcgatgtatgaaaactgatgtaaagaatacactttcagaaataaaaagcagcagtgctgcttctggagacatgcagacaagccttttttctgctgaccaggcagctctggctgcatgtggaactgaaaactctggcagattgcaggatttgggaatggaactcctggcaaagtcatcagttgccaattgttacatacgaaactccacaaataagaagagtaattcgcccaagccagctcgatccagtgtagcaggtagtctatcacttcgaagagcagtggaccctggagaaaatagtcgttcaaagggagactgtcagactctgtctgaaggctccccaggaagctctcagtctgggagcaggcacagttctccccgagccttgatacatggcagtatcggtgatattctgccaaaaactgaagaccggcagtgtaaagctttggattcagatgctgttgtggttgcagttttcagtggcttgcctgcggttgagaaaaggaggaaaatggtcaccttgggggctaatgctaaaggaggtcatctggaaggactgcagatgactgatttggaaaataattctgaaactggagagttacagcctgtactacctgaaggagcttcagctgcccctgaagaaggaatgagtagcgacagtgacattgaatgtgacactgagaatgaggagcaggaagagcataccagtgtgggcgggtttcacgactccttcatggtcatgacacagcccccggatgaagatacacattccagttttcctgatggtgaacaaataggccctgaagatctcagcttcaatacagatgaaaatagtggaaggtaattgccaaatcaagagaactgacttgcaagctaccttgaccctgaattttgctgtagttggtgctcaaatttgtcatcagtcagataatcagatttggtcttatttcttcattatctcgacctgaaatagtaatttggaaactgttggaaggtggcacagtttagtctaagacagcagtagtacatgggaaaaacagtatgggaagagttctttgtaatgtaaggaaataacaatgtagttctctattaatttagcaaatttgtacattcacaaaaggcagtttgtctactacagcagaaggctggttaactgccagaaaatgtacctccaggccctgcatgccgtcagtaacccgcccggcattggtgctctactgtctttggctagagcttagttgtgtttaaataatcatctttatatttggggttttaattacagttccattagtgcctgtagattagtgaacagaaaattgctttggaagagattctgccctgtagacactatgtgaataactgaagtaacactagactgaatctcctttttggagtatgtatcttctctcacttgttcaagtacaggcacactgttcaaccgcatggtatctttctgttgtgtgacttctacaaatgtaattttaaatgaaattaagttaacatggattcattacgttcctggccctgtagacacgtgtaagattatttaaaattctttcatttttttctgcctcttactatacgactgtagtgcaacaaatattttaaagcccccttttcttctttattttcattagttgtacattgatttcagtgtcaacacatttaaagattcattcatgttgcacagtggcttacatgaacgtgaaactgtgatataaggttttctttcatactcataattagcccaaaacagttgccaaactttgccattgtgctcctgcatttgtgtttgagctgctatatatttgtggaaattacactgaaagttgactaagagactattgaaaaagcatgaataattaaatatacatgtgagagacatctcatctgctgtattttacttagtgaatattgttcactcttccgtgtctgatgtcttgctgaatgctgtgactcatagtttacttttgttcaaaatagtttgcactttttgttaataaaatcaacttgagaaaaaaaaaaaaaaaaaaaaaaaaaaaaaaaaaaaaaaaaaaaancg

SEQ ID NO: 32 - DNA, 1554 bp, Homo sapiens
  misc_feature (695)..(695): n equals a,t,g, or c
  misc_feature (874)..(874): n equals a,t,g, or c
  misc_feature (1190)..(1190): n equals a,t,g, or c
gctttaatagtgtacacttacacatctggaaggaagagagttccatatggcagggatgattgggacaggagggatcttttgataactttgtgtgagcatgaaaatcgaatggggaagggagagctgtgaaaaaaaaatgttatctctttttttttgcttctggaaacccagctttttggtcagccgtcttgtgatttggctgggcctggtttgtgggggtcgctctctgagttgggtagctcttggagaagattatctgggaactcccatccttatcccaaacatacaccaaacctgcccccatccaccattatgggaattagtaccagagcatccttgcagattagttctcattttctctctttgtgagcacacacacatcaggtagagttccagaaacccagctttaggacactgttcacatatcacaggaggagcaaggacatgaatacaagagagctctttcctgaccagcagtgggargtggttgtactatctatttawttgtttattwatttatttattttttgagatggartctccttctgtcacccaggctggagtgcagtggcatgatctcggctcactgcaatctctgcctcctgggttcaagcagtcctcctgcctcagccccccaagtagctgsgattacaggctgcaccaccatgccccgctaatttttgtatttttagtanagatggggtttcaccatgttggccaggctggtctgtaactcctgamctcaggtgatccacctgccttagcctcccaaggtgctgggattacaggtgtgagccaccgtgcccggsctggttccactatttattaaaatgtatatatgtgttttycacttttttggtaggcattttattgntaataatttggaaattaaaaaaatttctccacaagcttattttttgtggagacaaggtctccctgtgttgcctaggctggtcttgaattcctgggctaagtgattggtctgccttggcctctcaaagtgctggggattacaggcataagtcaccatgccctgtttgscagcaagktttawackgctctttttggtagggawwtkctmaggtwcagtgatagagaacatgkagttgtggtgggawacagtggctyatgactgtatccgcactttgggaggctgaggcaggaggattgcttgaggctgagagttgagnacaggcctgggcaacatagcaagacaccttctctaaaatgaaaaaaattagctggatgtggtgtcatgtacctgtagtcccagttgcttgggaggctgaggcaggaggatcacttgagcctgggtgttcaagataggcctggtcaacacagcaagaccccttctctaaaaatgaaaataaaaaaattagctggttgtggtggcatgtacctgtagtcccagttacttgggaggctgagacaggaggattgcttgagccaggggtttgaggctgcagtgagctatgactgctcccctgcaccccaggctgggtgacagagtgagacccagtctctaaaataaaaaaaaaaaaaaaaaaactcgta

SEQ ID NO: 33 - DNA, 730 bp, Homo sapiens
gggagaacttctttattcacatattgcattgttttacaaatggaacctgcgagtctatggatgccatctttttaacatggtctggaactgaacctacaatatttctgagaaaattgactttgcttctttgagaacagcatggtgagtctactatccttgacttttcatcaatttgtttcatcactaaagtatttcaagttgctgtctacgtcaaggcaagaaattctgtagggtttcagctgaaaaatcagaagccacacaggcttgctggaacacacagctgcatttccagctctgattttaaatgtgcwctatctggatccatattctggcacaatctgcctcttgtgatgaagatgaaaatggttaccttaaagttctcttcggtcaggccttcttcagttttagcatctctaatcattgcagcaacgtatcgcttcaccaggttcctcataacttcctgaggcattttagaacaagagtattgatactcaatgagtaaataaatttcctcctgagtcagttctgaaggggggactgcattttattttagtgaaaatttcaagacatagtacaaggacaacttacttggtattggtgatgtcttctcaagttatcagcagctcgcctctgaaaaggaaaaggacattcctttctggttatactgttatattactattctaaaaaataatttatttttttaatcgaaaaaaaaaaaaaaaaaactcga

SEQ ID NO: 34 - DNA, 2084 bp, Homo sapiens
  misc_feature (2075)..(2075): n equals a,t,g, or c
  misc_feature (2083)..(2083): n equals a,t,g, or c
ggcacgaggagttgtgcagatacctggctgagagctggctcaccttccagattcacctgcaggagctgctgcagtacaagaggcagaatccagctcagttctgcgttcgagtctgctctggctgtgctgtgttggctgtgttgggacactatgttccagggattatgatttcctacattgtcttgttgagtatcctgctgtggcccctggtggtttatcatgagctgatccagaggatgtacactcgcctggagcccctgctcatgcagctggactacagcatgaaggcagaagccaatgccctgcatcacaaacacgacaagaggaagcgtcaggggaagaatgcacccccaggaggtgatgagccactggcagagacagagagtgaaagcgaggcagagctggctggcttctccccagtggtggatgtgaagaaaacagcattggccttggccattacagactcagagctgtcagatgaggaggcttctatcttggagagtggtggcttctccgtatcccgggccacaactccgcagctgactgatgtctccgaggatttggaccagcagagcctgccaagtgaaccagaggagaccctaagccgggacctaggggagggagaggagggagagctggcccctcccgaagacctactaggccgtcctcaagctctgtcaaggcaagccctggactcggaggaagaggaagaggatgtggcagctaaggaaaccttgttgcggctctcatcccccctccactttgtgaacacgcacttcaatggggcagggtccccccaagatggagtgaaatgctcccctggaggaccagtggagacactgagccccgagacagtgagtggtggcctcactgctctgcccggcaccctgtcacctccactttgccttgttggaagtgacccagccccctccccttccattctcccacctgttccccaggactcaccccagcccctgcctgcccctgaggaagaagaggcactcaccactgaggactttgagttgctggatcagggggagctggagcagctgaatgcagagctgggcttggagccagagacaccgccaaaaccccctgatgctccacccctggggcccgacatccattctctggtacagtcagaccaagaagctcaggccgtggcagagccatgagccagccgttgaggaaggagctgcaggcacagtagggcttcttggctaggagtgttgctgtttcctcctttgcctaccactctggggtggggcagtgtgtggggaagctggctgtcggatggtagctattccaccctctgcctgcctgcctgcctgctgtcctgggcatggtgcagtacctgtgcctaggattggttttaaatttgtaaataattttccatttgggttagtggatgtgaacagggctagggaagtccttcccacagcctgcgcttgcctccctgcctcatctctattctcattccactatgccccaagccctggtggtctggccctttctttttcctcctatcctcagggacctgtgctgctctgccctcatgtcccacttggttgtttagttgaggcactttataatttttctcttgtcttgtgttcctttctgctttatttccctgctgtgtcctgtccttagcagctcaaccccatcctttgccagctcctcctatcccgtgggcactggccaagctttagggaggctcctggtctgggaagtaaagagtaaacctggggcagtgggtcaggccagtagttacactcttaggtcactgtagtctgtgtaaccttcactgcatccttgccccattcagcccggcctttcatgatgcaggagagcagggatcccgcagtacatggcgccagcactggagttggtgagcatgtgctctctcttgagattaggagcttccttactgctcctctgggtgatccaagtgtagtgggaccccctactagggtyaggaagtggacactaacatctgtgcaggtgttgacttgaaaaataaagtgttgattggctagaaaaaaaaaaaaaaaaaaaaaaaaactcgagggggggcnccggtacnc

SEQ ID NO: 35 - DNA, 1016 bp, Homo sapiens
taattcggcagagccagcctgggtgcctgtatgcgctcgaggcgggggcgcgggttgcggacggaggcgcgggaggcggttctgcgcggcgggggccgtacccgcggcggagcgaggaggcgagaatggatcaatggtgtcacggagcacatcgctgacgctgattgtgttccttttccacagattgtctaaagccccaggaaaaatggtggaaaattcaccgtcgccattgccagaaagagcgatttatggctttgttcttttcttaagctcccaatttggcttcaaaaatctgaagggatctcgtgtttgctgagtgttccgtgtgccagcactagcctaggaggttttagtctctacaaatatttatacagcaccagacgcgatggcaaagtggataaagcctggtccctgcccttaaggaggtcgtggtcttgtggaggagacagatggtactttacctcgtgtgggcctttattcctgaatcttggctaaactctttaggtttaacctattggcctcaaaaatattgggcagttgcattacctgtctacctccttattgctatagtaattggctacgtgctcttgtttgggattaacatgatgagtacctctccactcgactccatccatacaatcacagataactatgcaaaaaatcaacagcagaagaaataccaagaggaggccattccagccttaagagatatttctattagtgaagtaaaccaaatgttctttcttgcagccaaagaactttacaccaaaaactgaactgtgtgtaaccatagtaacaccaagcacgtatttatttataagtttttgccattataattttgaccataaattaatttgaccatctctcttattaatagagaagtaaaaaatgtaagttgaccttctcttagattatgttcaatgaatattgtaaatgttcaagtattgttaatgaatagaataaatacaatattgcattcccataaaaaaaaaaaaaaaaaaaaaaaaaactcgtag

SEQ ID NO: 36 - DNA, 1430 bp, Homo sapiens
cggcacgaggagcagctgagtcccttccctgtctttcactcttctggcatcggtggttttacttcttcgattgaaccctgcttcctcgacccccctgggaggccgccttcttcaggcgcctcccttctctccacgagctcgctctgacagctgaggaactggcaagatcctgctacccagagggtgaatgggtatctttcccggaataatcctaatttttctaagggtgaagtttgcaacggcggccgtgattgtaagcggacaccagaaaagtaccactgtaagtcatgagatgtctggtctgaattggaaaccctttgtatatggcggccttgcctctatcgtggctgagtttgggactttccctgtggaccttaccaaaacacgacttcaggttcaaggccaaagcattgatgcccgtttcaaagagataaaatatagagggatgttccatgcgctgtttcgcatctgtaaagaggaaggtgtattggctctctattcaggaattgctcctgcgttgctaagacaagcatcatatggcaccattaaaattgggatttaccaaagcttgaagcgcttattcgtagaacgtttagaagatgaaactcttttaattaatatgatctgtggggtagtgtcaggagtgatatcttccactatagccaatcccaccgatgttctaaagattcgaatgcaggctcaaggaagcttgttccaagggagcatgattggaagctttatcgatatataccaacaagaaggcaccaggggtctgtggagggtaagtactcttttcctgctattatcctacactctcagttcctacaatttgcagagaatttttttttatataaagacataaaatcgtgaattataatccaaaaactaaggtaagaaactcctcatctcccttgaaaggcccaaaacttatcattggccttttatttctgcataatgtttggggattatataggtggggaaagttattacattatttgagatggctgtttcgatcatattcacagtgaatgtagttgttcagtgtatttttttgcaagttctgtactaacacgatgatgtatgtctttgtagtgcttatgttcaaaagctgttaccggctgtgtgctgtggctcatgcctgtagtcccagcactttgggaggccaacgcgggtggatcacttgaggtcagaagttcaagaccagcctggccaacctggtgaaaccccatctcaactagaaatacaaaaattagccaggcatggtggtgcatggctgtggtcacagctactcaggaggctgaggcgggagaattgtttgagccctggaggtggaggttgcagtgagccaagatcatgccactgcactccagcctgggtgacggggcgagactctgtctcaaaaaaaaaaaaaaaaaaaaaaaaaactcgag

SEQ ID NO: 37 - DNA, 400 bp, Homo sapiens
tcgacccacgcgtccgccctgcatggcgagatgtcctcctttcccgggccacagtgtgtgcaactaataaacctcctccatctcatctgcccagtgtcgggtcttgtgtgttcagccatcaccatagccctcaggcagaagtccatccctcaccaacagggaagagaggcagtgatcaaaacacctcctccaggaagtcttccctgaagttcgtagtctggcttcagtgccacttcttccctgccctcatattcgctaaccgccacttactgcctggttttcagcctcactaggatgtgggccactaagggccaacatggtcctacttgcagctgcattatcagggcctaccataacaccttccaaatgcttaaaaaaaaaaaaaaaaaaaagggcggcc

SEQ ID NO: 38 - DNA, 1106 bp, Homo sapiens
  misc_feature (1017)..(1017): n equals a,t,g, or c
gagcaagctcatttttttttcctatgaggcttttgtaagtcctgacctgtatttactgttaacttcttagcttgggttcatgcacccccagtcagtataactgtggacctcatacccactttggcacaggcttggagtatggatttattacaggtctgtttctttttgtttttctcccatttatggtcctggacagaaggtaagcttccttgcaacttccctggtccggtgggtagagttttcttgtcccctttccagatgttaggttttaaacaatgactgttctttctccatcatgtagaccaaaggccaagttctgtgtccccatgggagattaaaacccaagcccctatgtctaggtccagtgcccactgatttctctaattgtgagtctttctgcttacctagtacctagagtttctcttcccaagttttaaaaatatcagttctaagtaggcctagcgtttctacatatttttagggagaggggaccctttctgtggcagctcagtgttcagcattcctgtaagttagcatgctctgtgtatagcagatatcactagtaatagcatttrgtaagtgatgttcacacatgctgctgtcatgaacactatctcatgttgtgtaacactttcatttttccaagaactttataatcagccgacttgaaactcacagtcgtcccctcagaaaggcagggcaaatgttgttatttccaatttgtcagaagctcagaaagcttattctgttgctgacagtccttgcaagggtcagaatcaggaccggagccccagatgcgctggtgtcactgatgtcccgtgccgggcatgagcccttctgtgcaaggagctccagtgtctcccggacagtgatgatgtgaaaacatttagaaccgacctacacaataaggcagattttcattctgtacccaaaacaggaacacagatttaatgcagagcaaaagggctttaatcaacagatatgttcatttttcacgtagacctattttacaagctnacttgtaagccagaaaatgacattcgagattttcaagtgagaacaaatgatttggtccaataattaaaaaaaaaaaaaaaaaactcgag

SEQ ID NO: 39 - DNA, 875 bp, Homo sapiens
  misc_feature (66)..(66): n equals a,t,g, or c
  misc_feature (872)..(872): n equals a,t,g, or c
ggcacagcgcgaggctgggtcccggcccaggagaaggaagtcgctgaaggcagtggccatgctggncgtggaaatgggaggcggttgcagrgggtctatggggcccggtcctggatactcggcaggaagccgtgtctgcagaggctcctccctgcctcaggtggccccgttcaaccccagccgtgcccatctcctgccaccgcctgtcggtgggggtttaaattcggtgtggctttctggggtgcagctcagcacccccccttatgcagactgggagggggtcgggcagtcccctcagccacgaggaccctggatgggttctagttcacttgggaccgtggggcctggctgcgtactgagtgggtgccccacagtcaaggccaacgggggctccccctgctctgagatgttgggagaaaggcggcttctggaaccttccgtgggacccgtaagtggctgtccagaaaggcgggagggtgggcacggggcacggggggcagctggggtcgtcgttaagggtcacgcatccgtacagttgaatttcctttctcttatcatgttttacccaccttgtcccttttttccccaattgtgcttttgcatttttttccttggcaaatgtaaactcagcctttcattcatgacgtgtgaaatttcagtttctctggagtttgtcagacggcgtgggaaccacgcctgaaactcaggtaataggaggaaaaaaaaaaaacttaaaaaaatttttaaaaaacataaaactactctctacctctgctggsccagcctgtctcgccctggccgcggcagggtggcctgtaacaatttcagttttcgcagaacattcaggtattaaaaggaaaaaaaaaaaaaanggg

SEQ ID NO: 40 - DNA, 710 bp, Homo sapiens
ggcacgagctgggcctccaggttcttcacctgtcacatgatcattttacatattgtggtctgtttatttaccatcagcatcatagaagagcaaaaagaagaaatactgtgctccactaaaagccaggctgagaaaacagttactcacattgagcagtgagtgaccactaggtgggcatttgttcatagctgcatggagaacaagtgcccatatacatctttctgctgatgcagcctctaaattttgaatgcatcagttttttaaactgcattgagcaatattccgtgggtgtgatccataatagcgtaactatttacgcctgtgacagagaggaaaactgtatggatatcagatatctttaagagctttttaatctttaatcaagttagtacttcttaaggatgattaaggccaggcagtggctcacacctgtaatcccagcattttgggaggccaagatgggtggatcccttaaggtcaagagttcaaggccatcctggccaacatggtgaaaccccatctctactaaaaatacaaaaattagctggggtgtggtggcaggcgcctgtaaccccagctactcaagaggctgagacaagagaatcgcttgaagccaggagttggagattgcagtgagccaagatcatgccacttcactccagcctggacagcagagtgggacttcttcttaaaaaaaaaaaaaaaaaaaa

SEQ ID NO: 41 - DNA, 1540 bp, Homo sapiens
  misc_feature (651)..(651): n equals a,t,g, or c
  misc_feature (1124)..(1124): n equals a,t,g, or c
agaattcggcacgagggcatattactttcctaggactgccacaacaaactattaccaactagcggcttaaaacaacaagagcttattcctcacagttctggaggccagaagtccaaaaccaaggtgtcaggaaggtcatgctctctccaaagtctccaaggatgctccttccttgcctcctccagcctctggtcgtggccaacatcccgagggttccttggcttgcagatgaatcacttaatcccacccccatcatcacatggcagtccccctgtgtagctcagctctgtccaaatttcccctttcctacaaggacattagtcactggattatgacacagctcatcttaactggattatatctgcaaagaccctgttatatctgcaaagacgagttaacattcacatgttccaggggagatatgaattttaaggggacagtattggacccagtataggagggcaggcagcagcgagggagccagggagggctggcctgacttgagcctgtttgaaaagcatcatcctcctaccaagactgggggctgctggttctgacaaggtttgcaggatcagctgggatgatgggttscamccaytccttcgagytacgttggacccctgggcccacttacagcaaggagcttgcccntycgtgtagctctycgtcagtgtgggaaaatctgartgagccagagaagggtgagattccccctgcagagcaggcagtactgagcaaatccaggatccagaactccagttctaatcctggctcttgcctgctttcctgtgtgaccctggggaagtggttttccctctctgagactctccttccccatgtgagtcacaagggctgggcctagctgacccccaaggcccttacatgagtggatagttgcattttaaacctggtgctccccaggataagggagtcaaccccaaggagactggggtttctcctgagcctggcccctggggatgagcactcactgtggaaaaagctggccacttcttagcccttgtcatgggcagaaaacatgcccctccagccccaccagcaccaacacacagccaagctcactgtttcatttttagagagaaatcagggctttcggtgcagctgantgacacagacaaggggcggggggacatgaaagggagcgggcaaggacggaaattacacttctcctagcaacctggttctgcagctcctaggcctggggccgcgtgatacatgccattcccaattaacgggatgttaaatataccccggctcagcctgccccatgctgagccccgcctggggcagtgcagggagccatgtgatggtgtagagcactctgcaacaccccatattcatgttcccactcctagggccccgctcggtccccaggaggccagagcggtcctgccctctgcctgagcatggctcagctccagcctccacttgccctcccctatgctggccagctcgggggtctgcaggcagcctgtggggcagggccagttggccaaactctccaagccagaagcccctcgag

SEQ ID NO: 42 - DNA, 1421 bp, Homo sapiens
ggcagagggagcggagagcgtgctaaccaatgacttgagggagtagggggccgggtttgggccctcagttgctaagggctacccgagtgggaagcggttcaagagatggggtgaagggtggttcaccggttcttcaagtcctcagccttctggcccgmggaagttaagcaaccaagaggcgggcctaagaccggaagcaggaaggagggcgcaggaagcagggcgccgcagcctgtcgtacggtccttctgtgggtctgtcggtgccgagggcaggatggagaagctgcggctcctgggcctccgctaccaggagtacgtgactcgtcacccggccgccacggcccagctggagacagcagtgcggggcttcagttacctgctggcaggtcgattcgccgattcgcacgagctgtcagagctggtgtactctgcctctaacctgcttgtgctgctcaatgacgggatcctacggaaggagcttcggaaaaagttgcctgtgtcgctgtcccagcagaagctgctgacatggctgagcgtgctggagtgcgtggaggtgttcatggagatgggagctgccaaggtgtggggtgaagtgggccgctggcttgtcatcgccctcatccagctggccaaggctgtactgcggatgctcctgctgctctggttcaaggctggcctccagacttcaccccctatcgttccactggacagagagaccaggcacagcccccggatggtgaccacagccywggyaaccatgagcagtcctacgtggggaagcggtcaaaccgggtggtgcgaaccctccagaacacgccgtccctgcactccaggcactggggagctccccagcagcgggagggacggcagcagcagcatcacgaggagctgagtgcgacccccacccccctggggcttgcaggagaccatcgcagagtttttgtacattgcccggccgctgctgcacttgctcagcctgggcctktggggtcarargtcgtggaaaccctggctcttggctggtgttgtggacgtgaccagcctgagcctcctgagtgacagaaagggcctgacccggarggagcggcgggagctgcggcgccggamcatcctgctgctctactacctgctgcgctctcctttctacgaccgcttctccgaggccaggatcctcttcctgctccagttgctggccgaccacgtccctggcgttggcctggtcacaaggccgctcatggattacttgcccacctggcagaaaatctacttctacagttggggctgacagactcccggaaggagggtgtggggaggggtgggcagggagcccctcttccctaataaaactgactccggcagcaaaaaaaaaaaaaaaaaaaaaaaaaaaaaaaaaaaaaaaaaaaaaaaaaaagggcggcc

SEQ ID NO: 43 - DNA, 2184 bp, Homo sapiens
ccacgcgtccgggcctgcctctccactcagagggacatcagctcaagagcaatcacacaaccccagagaagaaatccaaacctcaccttctgttgctgcttctctactatcttatgggtgcttgactggctctcccaagcctgctgtcctgcagcctcactgcctgtgtccttttctcaggcagtgtgctggcgttccatgcgacgtggctgtgcagtgctgggagccctggggctgctggccggtgcaggtgttggctcatggctcctagtgctgtatctgtgtcctgctgcctctcagcccatttccgggaccttgcaggatgaggagataactttgagctgctcagaggccagcgctgaggaagctctgctccctgcacttcccaaaacagtatctttcagaataaacagcgaagacttcttgctggaagcgcaagtgagggatcagccacgctggctcctggtctgccatgagggctggagccccgccctggggctgcagatctgctggagccttgggcatctcagactcactcaccacaagggagtaaacctcactgacatcaaactcaacagttcccaggagtttgctcagctctctcctagactgggaggcttcctggaggaggcgtggcagcccaggaacaactgcacttctggtcaagttgtttccctcagatgctctgagtgtggagcgaggcccctggcttcccggatagttggtgggcagtctgtggctcctgggcgctggccgtggcaggccagcgtggccctgggcttccggcacacgtgtgggggctctgtgctagcgccacgctgggtggtgactgctgcacattgtatgcacagtttcaggctggcccgcctgtccagctggcgggttcatgcggggctggtcagccacagtgccgtcaggccccaccaaggggctctggtggagaggattatcccacaccccctctacagtgcccagaatcatgactacgacgtcgccctcctgaggctccagaccgctctcaacttctcagacactgtgggcgctgtgtgcctgccggccaaggaacagcattttccgaagggctcgcggtgctgggtgtctggctggggccacacccaccctagccatacttacagctcggatatgctccaggacacggtggtgcccttgttcagcactcagctctgcaacagctcttgcgtgtacagcggagccctcaccccccgcatgctttgcgctggctacctggacggaagggctgatgcatgccagggagatagcgggggccccctagtgtgcccagatggggacacatggcgcctagtgggggtggtcagctgggggcgtggctgcgcagagcccaatcacccaggtgtctacgccaaggtagctgagtttctggactggatccatgacactgctcaggactccctcctctgagtcctgctgtttcctccagtctcactgcacaccactgcctcatgcttcctggggcctccagcagctccactaatggaggagaggcagtagcctccgacacagaacgcatggacctcctactactgtgtgtgaggaacagtcactacccactggccagccacccagccaacaggtctctcctcttgggcctgatttcagagtcctctttctcactagagactcaatgacagaagagaggctgggacttggttgggcatgctgtggttgctgagggatgagggggaggagagaggtaggagctggagatgaagaggctgctagaagcagcaggaagcctgcccttctgccttttcccttccctgcccctgtgtgagtcttttgggagggtgctgggaggtgccccccgtcccacctttttcctgtgctctaggtgggctaagtgcctccctagaggactccatggctgagaggctcctgggcagatggggtcaaggctgggccagcccagatgaagcctatgggagtcaggaccctctccactctccctctccactccccttcctgttctcacctggctgtggctggccctgtgtggggtgggtacactggaaaacaagaaggttggagttggtctaggacattggttttaaatgacagttctgtgaactggtccaaggagttctgttattaaagtgatatatggtcttggtccaaaaaaaaaaaaaaaaaaaaaaaaaaaaaaaa

SEQ ID NO: 44 - DNA, 4463 bp, Homo sapiens
  misc_feature (3308)..(3308): n equals a,t,g, or c
  misc_feature (3469)..(3469): n equals a,t,g, or c
  misc_feature (4119)..(4119): n equals a,t,g, or c
cagcaatgaaatcctgctttcttttcctcagaactactatattcagtggctaaatggctccctgattcatggtttgtggaatcttgcttcccttttttccaacctttgyttatttgtattgatgccctttgcctttttctttctggaatcagaaggctttgctggcctgaaaaagggaatccgagcccgcattttagagactttggtcatgcttcttcttcttgcgttactcattcttgggatagtgtgggtagcttcagcactcattgacaacgatgccgcaagcatggaatctttatatgatctctgggagttctatctaccctatttatattcctgtatatcattgatgggatgtttgttacttctcttgtgtacaccagttggcctttctcgtatgttcacagtgatgggtcagttgctagtgaagccaacaattcttgaagacctggatgaacaaatttatatcattaccttagaggaagaagcactccagagacgactaaatgggctgtcttcatcggtggaatacaacataatggagttggaacaagaacttgaaaatgtaaagactcttaagacaaaattagatccttggagttctttttctgtgcttcagtctcctgtctggcactttgctgcacagactccagctgacatagtctccccagattcccatttcatgctctcaactcaagggatgagctgggctcagcttgtgttcctccttcctgcatcacggcctggaaactctcaagacaagaggcgaaaaaaggcttcagcatgggaaagaaatttggtgtatcccgctgttatggttctccttcttattgagacatccatctcggtcctcttggtggcttgtaatattctttgcctattggttgatgaaacagcaatgccaaaaggaacaagggggcctggaataggaaatgcctctctttctacgtttggttttgtgggagctgcgcttgaaatcattttgattttctatcttatggtgtcctctgttgtcggcttctatagccttcgattttttggaaactttactcccaagaaagatgacacaactatgacaaagatcattggaaattgtgtgtccatcttggttttgagctctgctctgcctgtgatgtcgagaacactggggcttcataaacttcacttaccaaatacttcaagggattcagaaacagccaagccttctgtaaatgggcatcagaaagcactgtgagacgcacagacggcgtcttctgccaccaagagaccgagaactccagattcacgacattcctgtcccatgtagaagcatttccattcawccgtggsccctcttcagaacctagacctatcagtgccatttttttttcataatctacgaagaacttggctatggctgatcttttttaaatttaactttctgatggaccctgtagtttccagttaagtgcagattccttacagacatatagaacagcgcattcttctgtagacatttgctcatgttggtaaatacaatcacccatatgaaaaaattgttttcacctgatatgaaaatgttagaaaaggcaaactccgggacttctaaagatttacttaaatcccattatgtactttattcagaatgtagaagctgacttgaaaggcatccttggtactaagtgaagcttattcagaaaatgcatttttcaaatgcaatggcaactgcttgtagatatcatttttgcagtgtatgttggagctgtaatggttgcaattatgtttcttatttccttaaaagcaaaaagcgtagtttctgatttatgttatagaatgatactgattagactttgagccaaggggaaaatactaaattcttttaaacctggagccttagagagccacaggaatatcttctgttgtacagtctaataagctgtggtaggaagtatcatgtaatcacagtttaatgacagtttatgtatatatataattcagtattccctctgataacatagttgccagtgtttaatacacttgtaacttggatttttaccttataggctatatgtatactcagttttttaaagcatttttttcagagatcacttaattccccatgcttctgcaatgcatataaaaactataaatgccgagtggtagaaactcctctttcttcatagtcctcaggctttggttacatttgcatatgccatttgaagcctccagcttttaccagtttaacatccaaagttcacagcatcagcattcatggtgtaagaacagttttgcagtataacacgatctgataatcattcagttattaaattgtaaataattattgggatggtttcttggctttaagtccactgaataaaaactatgaaattgcactctgtgtcaaccatccactaggatagaataccgaaatctgtgcatgcaaaaataggagatgggcccatttgcacacaattcgtagttatgcagtctgctatataaatatgttcacatgcactgtgtgtatgaaaatagatggtctgtgttcagacaaaagtaaaacatttttttcaaattgttacatttaaaggttttctgggagaaatttatgaaacgcaggctgtgtctatttgacatcagaaatttccactttaaaccaaaataataagaaactttaatctgtatatttacaacctttgttgagtacacttcccccttatttatacgtctgcatttccttccgagcttcacatctttctaaaatgcagcttggttttaaaataaaagaacattcattttgtgattctaaacaagcttcagtaaataccaccagtatagtactggtgaatttctcagcataaaatcgacatacctaaaaagttaataaaattcagctcttttccaatttcattgttatgcctattgaagtattaattgccaggtttgatttttagtgaagcttggagtccatactttgagcagaccaagtgaagggaagaacagaaagaaactcaggagtagagtaatatcacttctgcacttacaccactttcaggcacatccaaagagttcctagatacttggaaaatgtctgaaaatttttaagtaaaatactaaacttttcagtgtttagctcaactttttgttcatttggaagtttctctccatccgaggacttaagccagttttggatttgtaagccctgagtacaatacacttcctggaggcatcctcactgctgttgaagcaaaggatatgcatggggtggaaggacggcttcgaacctgggactcatatgccttgagaacaaatagattgttacagccttgggntgctgcgtaatcacggttcctcgaggctcttcctgagcacatgcccaagcatctgcctctggagagactgactccaaatgcaggtgcttccattggagctaggtcggaggctgctttatatgacgaactcccagaaatggatgcccagaatacggaggccnaaacgttctgagcycctggtaaggacagtcgctctgggggtcctcattttacctgcagttcctgcacgcccagtgaaagagaggagatagaccctggaaggcagagctgcagatgctcatcatcaggtcaattctggagctacagttttgtttctgactggatagggatgcaccagtgactgtcacatcaagcagtccttttattctctctcctttagtatcgattttaaagggcattaggcactatggttccagagtttcttggggaaaacttgcagattcttattaattggttctgcaatacttaaataaattattttacaattataagttttcagattataacatttgtattaatttttactgattttccaagatacttcttagatttactatttacgtagctttatgtacattctctgtaaaaatagacctctaaatatgaggctttacatgaaatttgtacacacatacacactaatgttagctccttaaattgctgcactaaggtgctggttagtagagatggacggagcctctcgcgttttgctctcagatgtgttaaaggcgcacgtgtacctgctctcagcggcagtgcggcctccccatctgctgggtgcccatggccctccctgcagcctcagtgatgnacctcgtctgccmrgggacacaggttttcatcatttacaggstcttatgtgctagttttgttggtagcacgttatttaatgcataaaggcagaattcttacaagtttttttttttaatgtgaacatagatgcagcaccgactttttaaacttgaaaaaactggtataatgttaacttttaaaaataacatttggacacactagtaattgatttttgtttacagattgttttgtttacaaattgttagtctttgtttctatgagatacttttagtgtgactttttaaatgtcttagaaattaaaagttgtacaaaaagtgatttcaaaaaaaaaaaaaaaaaaaa

SEQ ID NO: 45 - DNA, 3447 bp, Homo sapiens
accaattcccttcctgggagttgcggcttccctcgctcggccccactcccgtttaccctttccccagctcccgccttagccaggggcttccccgcctgccgctagggctcgggccgaagcgccgctcagcgccagcctgccgctccccgggctccactttcactttcggtcctgggggaactaagccggaggcagtggtggtggcggcggcgcaagggtgagggcggccccagaaccccaggtaggtagagcaagaagatggtgtttctgcccctcaaatggtcccttgcaaccatgtcatttctactttcctcactgttggctctcttaactgtgtccactccttcatggtgtcagagcactgaagcatctccaaaacgtagtgatgggacaccatttccttggaataaaatacgacttcctgagtacgtcatcccagttcattatgatctcttgatccatgcaaaccttaccacgctgaccttctggggaaccacgaaagtagaaatcacagccagtcagcccaccagcaccatcatcctgcatagtcaccacctgcagatatctagggccaccctcaggaagggagctggagagaggctatcggaagaacccctgcaggtcctggaacacccccctcaggagcaaattgcactgctggctcccgagcccctccttgtcgggctcccgtacacagttgtcattcactatgctggcaatctttcggagactttccacggattttacaaaagcacctacagaaccaaggaaggggaactgaggatactagcatcaacacaatttgaacccactgcagctagaatggcctttccctgctttgatgaacctgccttcaaagcaagtttctcaatcaaaattagaagagagccaaggcacctagccatctccaatatgccattggtgaaatctgtgactgttgctgaaggactcatagaagaccattttgatgtcactgtgaagatgagcacctatctggtggccttcatcatttcagattttgagtctgtcagcaagataaccaagagtggagtcaaggtttctgtttatgctgtgccagacaagatgaatcaagcagattatgcactggatgctgcggtgactcttctagaattttatgaggattatttcagcataccgtatcccctacccaaacaagatcttgctgctattcccgactttcagtctggtgctatggaaaactggggactgacaacatatagagaatctgctctgttgtttgatgcagaaaagtcttctgcatcaagtaagcttggcatcacaatgactgtggcccatgaactggcccaccagtggtttgggaacctggtcactatggaatggtggaatgatctttggctaaatgaaggatttgccaaatttatggagtttgtgtctgtcagtgtgacccatcctgaactgaaagttggagattatttctttggcaaatgttttgacgcaatggaggtagatgctttaaattcctcacaccctgtgtctacacctgtggaaaatcctgctcagatccgggagatgtttgatgatgtttcttatgataagggagcttgtattctgaatatgctaagggagtatcttagcgctgacgcatttaaaagtggtattgtacagtatctccagaagcatagctataaaaatacaaaaaacgaggacctgtgggatagtatggcaagtatttgccctacagatggtgtaaaagggatggatggcttttgctctagaagtcaacattcatcttcatcctcacattggcatcaggaaggggtggatgtgaaaaccatgatgaacacttggacactgcagaggggttttcccctaataaccatcacagtgagggggaggaatgtacacatgaagcaagagcactacatgaagggctctgacggcgccccggacactgggtacctgtggcatgttccattgacattcatcaccagcaaatccgacatggtccatcgatttttgctaaaaacaaaaacagatgtgctcatcctcccagaagaggtggaatggatcaaatttaatgtgggcatgaatggctattacattgtgcattacgaggatgatggatgggactctttgactggccttttaaaaggaacacacacagcagtcagcagtaatgatcgggcaagtctcattaacaatgcatttcagctcgtcagcattgggaagctgtccattgaaaaggccttggatttatccctgtacttgaaacatgaaactgaaattatgcccgtgtttcaaggtttgaatgagctgattcctatgtataagttaatggagaaaagagatatgaatgaagtggaaactcaattcaaggccttcctcatcaggctgctaagggacctcattgataagcagacatggacagacgagggctcagtctcagagcgaatgctgcggagtgaactactactcctcgcctgtgtgcacaactatcagccgtgcgtacagagggcagaaggctatttcagaaagtggaaggaatccaatggaaacttgagcctgcctgtcgacgtgaccttggcagtgtttgctgtgggggcccagagcacagaaggctgggattttctttatagtaaatatcagttttctttgtccagtactgagaaaagccaaattgaatttgccctctgcagaacccaaaataaggaaaagcttcaatggctactagatgaaagctttaagggagataaaataaaaactcaggagtttccacaaattcttacactcattggcaggaacccagtaggatacccactggcctggcaatttctgaggaaaaactggaacaaacttgtacaaaagtttgaacttggctcatcttccatagcccacatggtaatgggtacaacaaatcaattctccacaagaacacggcttgaagaggtaaaaggattcttcagctctttgaaagaaaatggttctcagctccgttgtgtccaacagacaattgaaaccattgaagaaaacatcggttggatggataagaattttgataaaatcagagtgtggctgcaaagtgaaaagcttgaacgtatgtaaaaattcctcccttgccaggttcctgttatctctaatcaccaacattttgttgagtgtattttcaaactagagatggctgttttggctccaactggagatacttttttcccttcaactcattttttgactatccctgtgaaaagaatagctgttagtttttcatgaatgggctatcgctaccatgtgttttgttcatcacaggtgttgccctgcaacgtaaacccaagtgttgggttccctgccacagaagaataaagtaccttattcttctcattttatagtttatgcttaagcacccgtgtccaaaaccctgtaccccatgtttatcattcataaactgtttcatcagtctcaaaaaaaaaa

SEQ ID NO: 46 - DNA, 767 bp, Homo sapiens
catgaaaacacattctcttatagtttttaaattcatcatccaagagttcctgctctttgatgatgagacatacctggtagactccaaaacagagagcagacgcctagtatctttgttctggggtgtgcattaagagtacattgacctgtctgtctccagtcttgactcttttggaagagagatgctagtactgatgacaacctgcattctggctgcggtgtgygtccacactgcacagtgtgcaccagactctcgtatggacaatgactgtccctcacatcaggcgcagatccattttagagcctcagaagtcaggagagggtggactttcaaccacgactgaaaacactgtctttcttaggacatgctgtgtgtatgacacacttacagatgtctgtgctcactgatgcttgttgatgtgtcatcgcacatcagtgacaaacatttgtcatgtttttgcctttggtggaacttctttattatactcactttcctcccaaaccatttttctcaacttcatcatgaagcaaatgtcatgtggtcattctgtgatggggctcagggctaggttaggtgatgatttctgaaagctcagagacgtgaaggaaaaaggacatcagtgcttggatcttagctcttataagcctcacgtgcaacaataaacccgagttcaagaatcagattcttagatagattggtttggtagcaaatgacaaaaaaccaacgtaaatatgcttcggcaaaaaaaaaaaaaaaaaagggcggcc

SEQ ID NO: 47 - DNA, 1932 bp, Homo sapiens
cccgcagcagctcccaggatgaactggttgcagtggctgctgctgctgcgggggcgctgagaggacacgagctctatgcctttccggctgctcatcccgctcggcctcctgtgcgcgctgctgcctcagcaccatggtgcgccaggtcccgacggctccgcgccagatcccgcccactacagggagcgagtcaaggccatgttctaccacgcctacgacagctacctggagaatgcctttcccttcgatgagctgcgacctctcacctgtgacgggcacgacacctggggcagtttttctctgactctaattgatgcactggacaccttgctgattttggggaatgtctcagaattccaaagagtggttgaagtgctccaggacagcgtggactttgatattgatgtgaacgcctctgtgtttgaaacaaacattcgagtggtaggaggactcctgtctgctcatctgctctccaagaaggctggggtggaagtagaggctggatggccctgttccgggcctctcctgagaatggctgaggaggcggcccgaaaactcctcccagcctttcagacccccactggcatgccatatggaacagtgaacttacttcatggcgtgaacccaggagagacccctgtcacctgtacggcagggattgggaccttcattgttgaatttgccaccctgagcagcctcactggtgacccggtgttcgaagatgtggccagagtggctttgatgcgcctctgggagagccggtcagatatcgggctggtcggcaaccacattgatgtgctcactggcaagtgggtggcccaggacgcaggcatcggggctggcgtggactcctactttgagtacttggtgaaaggagccatcctgcttcaggataagaagctcatggccatgttcctagagtataacaaagccatycggaactacacccgcttcgatgactggtacctgtgggtwcagatgtacaaggggactgtgtccatgccagtcttccagtccytrgaggcctactggcctggtctkcagagcctcrttggrgacattgacaatgccatgaggaccttcctcaactactacactrtatggaagcagtttggggggctcccrgaattctacaacattcctcagggatacacagtggagaagcgagagggctacccwcttcggccagaactyattgaragcgcaatgtacctctaccgtgccacgggggaycccaccctcytagaactcggaagagatgctgtggaatccattgaaaaaatcagcaaggtggagtgyggatttgcaacaatcaaagatctgcgagaccacaagctggacaaccgcatggagtckttcttcctggccgagacygtgaaatacctctacctyctgttygacccrrccaacttcatccacaacaayggstccaccttcgacgcggtgatcaccccctatggggagtgcatcctgggggctggggggtacatcttcaacacagaagctcaccccatcgaccctgccgccctgcactgctgccagaggctgaaggaagagcagtgggaggtggaggacttgatgagggaattctactctctcaaacggagcaggtcgaaatttcagaaaaacactgttagttcggggccatgggaacctccagcaaggccaggaacactcttctcaccagaaaaccatgaccaggcaagggagaggaagcctgccaaacagaaggtcccacttctcagctgccccagtcagcccttcacctccaagttggcattactgggacaggttttcctagactcctcataaccactggataatttttttatttttatttttttgaggctaaactataataaattgcttttggctatcaaaaaaaaaaaaaaaaaaaaaaaaaaaaaaaaaaaaaaaaaaaagggcggccgc

SEQ ID NO: 48 - DNA, 728 bp, Homo sapiens
aaatgatttagtgacctatacaagtagcctgcagtaccggatccgaattcccggtcgacccacgcgtccggtgaaaacagcagagtgctactccataccactgggatcttgtccagtaaacatccagagagtgaggttaggaaataaaaagtatataaatattagatgcctagaaatgcaagtcactttaaagattttatgtgaaatagaaaaaaaagagaggagagggactcattgtcttgtaatgggtccttcccagagagaggtgactgtccagtggcaccgggcccttttcctccttccccttttactcttatcaactaggacagaaactaagaattttggcttcaagtggctaaaagactgatgggggaaaaaagaaaatagaaaaaaataacagagagactgacgctctaggcagttacaagtccaagaaaaaagacagaaacttttaagtattgagccaaaaccaggtctagcaamcataatgctggccctagattatttattaatttatgaagaaacttctagatatgggggtgacaaaaggaaattaaatccattatatatgcatatattttaatgtaaatatataatagataaattatgtatacataatatataaccaaattgaaacagttttacaatttggtttgactggaaattcaaaatccatatattaatttttgtagtaaaagtttatgtaaaaaaaaaaaaaaagggcggcc

SEQ ID NO: 49 - DNA, 1727 bp, Homo sapiens
  misc_feature (979)..(979): n equals a,t,g, or c
  misc_feature (1047)..(1047): n equals a,t,g, or c
  misc_feature (1135)..(1135): n equals a,t,g, or c
ccacgcgtccggccatggttgccactgtctgtggcctcctggtcttcctgagcctgggcctggtacccccagtccgctgcctgtttgcactcagcgtgcccaccctgggtatggagcagggccgccggctgctcctgtcctacagcactgccaccctggccattgctgtggtgcccaacgtcctggccaacgtgggtgcggccgggcaggtgctgaggtgtgtcaccgagggctccctggagagtctcctcaataccactcaccagctgcatgcagcatccagggctctgggccccacaggccaggcaggcagccggggcctgacatttgaggcccaggacaatggctctgccttctaccttcacatgctcacggtcactcagcaggtcctggaggatttctctggcctggagtccctggcccgggcagcagcgctagggacccagcgagtggtcacagggctgtttatgttgggcctcctggtggagtcggcatggtacctccattgctacctgacagacctgcggtttgacaatatctacgccactcaacagctgacccagcggttggcacaggcccaggctacacacctcctggcccctccacccacctggctgctccaggcggctcagctgaggctgtcacaggaggagctgttgagttgtcttctaaggctggggctgcttgccctgctcctcgtggccacggctgtggcggtggccacagaccatgtagccttcctcctggcacaggctactgtggactgggctcagaagttgccaactgtgcccatcacgctcacggtcaagtatgatgtggcatacactgtcctgggcttcatccctttcctcttcaaccagctggctccggagagccccttcctctccgtccacagctcctaccaatgggagctccgcctcacctccgcccgctgcccactgctacccgcccggcgtccccgcgcagctgccccgctggncgcggggggcctgcagctcctggcgggctccacggtgctcctggagggctacgcccgccgcctgcggnatgccatcgccgcttccttcttcacagcccaggaggcgaggaggatccgccacctacacgcccggctccagcgaagacacgacaggcnccaaggccagcagctgcccctaggggatccttcttgcgtccccacacccagacctgcctgcaagcctccggcatggatagcctacaggctggatgccttaagaaccgagagcagtgagggagaagggaaagagctttggagttgcagagacctgagttgtcaccttggtcctgtgccgcctccctgtgtgaccttgggtaagtcacttcacctctctgagcctcggtttctacatctgcataacgacagcatatttaccattgatgtgacctacttcccacgcagggatgtggtcaggatggaaggaaatactgggcatgataggcctggataaccggtaaagaaccatgcaaaggcgaagacaaggagtgcagagagagctcatggttcctccaggctggttggcgatcaggctcatctcatctgcaccaactgctctacttgttagatggagaccttgcatcatgaatttctcgaaatgctcctggaacttatttatatgcctcaaaatcctctaaactcatttatagtaacccatagttttaattttataaataaacgtatttattaaatcttaaaaaaaaaaaaaaaa

SEQ ID NO: 50 - DNA, 2504 bp, Homo sapiens
tcgacccacgcgtccgcgagtgcctgcaggactgggcctccttcctccgcctggccatccccagcatgctcatgctgtgcatggagtggtgggcctatgaggtcgggagcttcctcagtggcatcctcggcatggtggagctgggcgctcagtccatcgtgtatgaactggccatcattgtgtacatggtccctgcaggcttcagtgtggctgccagtgtccgggtaggaaacgctctgggtgctggagacatggagcaggcacggaagtcctctaccgtttccctgctgattacagtgctctttgctgtagccttcagtgtcctgctgttaagctgtaaggatcacgtggggtacatttttactaccgaccgagacatcattaatctggtggctcaggtggttccaatttatgctgtttcccacctctttgaagctcttgcttgcacgagtggtggtgttctgagggggagtggaaatcagaaagttggagccattgtgaataccattgggtamtatgtggttggcctccccatcgggatcgcgctgatgtttgcaaccacacttggagtgatgggtctgtggtcagggatcatcatctgtacagtctttcaagctgtgtgttttctaggctttattattcagctaaattggaaaaaagcctgtcmgcaggctcaggtacacgccaatttgaaagtaaacaacgtgcctcggagtgggaattctgctctccctcaggatccgcttcacccagggtgccctgaaaaccttgaaggaattttaacgaacgatgttggaaagacaggcgagcctcagtcagatcagcagatgcgccaagaagaacctttgccggaacatccacaggacggcgctaaattgtccaggaaacagctggtgctgcggcgagggcttctgctcctgggggtcttcttaatcttgctggtggggattttagtgagattctatgtcagaattcagtgacgtggtaggaaagaaagtcaggtcaagtgatgcttttgagcttacacacaattcacaggcccaccagtgacaatttactgtgagttaatgtcattcaggtgtgcccatggattttgagggctggaaatgcaaagacacatttttctataaaaagaaaaagcaactaaggttaaaagctatattgtggcccaagacactgtctgaaagatgacatgagtagtaattcaccactatctgaaccaagcaaggatcaatgtgctgactgcattggccaatggctttgatacttctgctatttttttagacacaaacccataaactaactgcttaagaattcatactgcttgaattatgtaaaatatattttacagtatatctttccttgggccttagattactattcactgggcaaatggtatttgtttttgttttaattttttttttaatagacggaagtcttgctctgtcatgcaggctggagtgcggtggtgcgatcatagctcactgcagcctcgaactcttgggcttcaagcaatcctcctgtgtcagccaccagagtagctgagactacaggggtatgccaccatgcccagctggcatttgttaatcttcatttgaggtctagatctaggcactgtggacactgaaaaacagttgggaaatctttcgagctgtggaaatccaaacaaagactgataattcctggtargggtgtgtgcstgacgtactgcarcctyaamctyctgggctyaagtgatcctcccacctcagcctcctgagtagctgagaccacaggcgtgtgccaccacgcctagctaatttttwawaccrgggtcwamcctttgtttcccaggstggtyttgaattcctgggatcaagcaatycttccacctkgsmctcccaaagtgttgggattataggcatgagccaccasgactggccagaggacaaaattttaataaaggtcttagcttaagcagtaatcytacttcattaagccttcctggggtgcggtacacaccgttaattcagcaaccctcagtacatactaagtatgctcagtgctgtgaaagtggattacaccaaattaagtcattcttatcacacccaatcaaaagtcaagaagccagggataaaagcacctcaggcacataacattaatctagtaatgtaattctctgcacatccagctggtgaaactgcgtgctgtaagctgggaccagctttgtccataactgctgagagaacttgctgaagctctaggaataattttgcctgcccggttgctcaccagttgtagcttgccagctcccaacacccttcctggtgccaataaactttctcaaagagcaatactgacatttcttttgataaaacctccagccttctctgtgttgttccgacataccgaggaccaactggtctacatggatgccctgaacatgcaattctttcttccaaaataaaacattaaatagagaaaaaaaaaaaaaaaaaaaaaaaaaaaaaaaaaaaagggcggcc

SEQ ID NO: 51 - DNA, 3091 bp, Homo sapiens
aaaccggaaagtttgtaggaaaattgctgcacatggcctttgcagaaaagagagccttcaaaacctcttacattccagtagaaaactctctctgcaagtccttaactttgttcactcattccaggaaggtgcttcaatattggatattcacacagagcccagtttttcaagtttgctttcacagtcatcgtatgctgacatgggtgttccacttcctgcaaaaaacttaatatttaaagatggtgtcttatcagaakggagtggacggtcaccttcctcacttcttattgctaatctccatttgcaataatttggttacaccatttgttgctcacactttctgccttttttctttcttaacgttagctttatagtgtcagccactaaaaagcatcctgctgctgcagtgcaattcttgcttaactaatattaaaagttggggaacatattcatgttttctgaagttttgctcattattgcacatcttattgcgacaaagtgctttttagcagccagcactgtattttttaccttgagacaatctgcatttcttttataaaactaagtatatactttataggctttatgatgactgttatgtttataagcagtcactatgaaaattgcaatggtaattttatatgttagtttatcaaacataaatcttgtttaattttatattttgttacctatactttgggggatcaagggaagagatggaactcttcctctgaaaaggcttcttggtacttaaagtagtaaaactataaaacaataaacatccagtattgagagatgatatgatagggcattatgaattcctatgggtgtctgtaaattatgtatgtcagttggacattgtagaaggtatgtaaatcagcatagttgtgtataacttaaccttgatttataaggtcttaagattatgactattcattgacatctcatgagaagctttagaagactttctatttttaaacaccatttatatgtggacttctgttgtcactgactttgggctttatattttcatagagtctttatggaaaaaatagaatttattttccactcttgtagctatagctgctgcacactttcaccctgatttatttttttgtttcttagctttgatgttttcaaaccaaggattgtgattttaggttagaattacatattagaagcattaagactatgtctttggatcagaatgctttagtgataaacctactttgaagacatactcttaagcaatctggatcttaaatttatgtgaatacttttttagaaaatgataaagaaaaatggaattacttcaaagtgtttcttgagtcattgattcttttagcatctcaaatgttaattagaataattggaatcactttttagacttttcaagttaccttccttgggaagtttgtgcagtgttatagtttagtttagctcctcttacagggtaatggtttgctagtttaaaactgtaaccaaacgaactggtcagacaacatatatctaaaacacttaaaatgttaggaagtttgggaatgttataacctaaacgtttttgctggtaactttttgttatttatagatatttgtgtatttaacatacatacttcaggaaatatatgcctttcctaaaacttaaccatgcattcaataccatggcctatctatagaattgaatattttggaccatgttatctgtggcacagtcagtgctgtgtttgaggtaaatgcagtaacggttagttttctactttgtcttatagaaggtagaaaccatgtgtatgttatgtttgtctataaaagaaaaaatactaatattaaataatttcttacgactctgagtcactcacttatttttccaataattgatattgtacattcctagtgccattaggtatgtatgtatgtaacttttacagtttttcagctgaaagttgtaagtattttttttttttgatcggggctctttaatctcattttaatttcctttgtttgaactgtagttatttattcctatattaaccatctaaaccaactgtaatgacatgtacactaatacagaattgaacatttgtagttgttggcagtgaacccagttgttggtgaatttaaagcttaaaatatgggaatgatttgctgctatatttcctttgagagagaaaggaggaagaaatagaacctaatagtgatcatgaattttagggaaagtaccgaagaaccatggggtcccctctggtttcttgtgttgaatgaggcaagggtaatcatctgattccgagctgaagacctctggtcctcttaaggagggagagtgcatttttagagcttttagcaaaatgtgaaaagctgatgtttgcgccttgctttgtgaatttggctttgttttacttatacattaactcatgtaatctcttaaatcttacaagcattgatccatttcaacaaaaaggtaaatttaaaatgcagactttgttatttgccaaagaagattcatgaaaaatttacgtccaattattttgcaaatagttaatttcatttggctttttaccatgttccttcctttctttttcccgcttccttaatgtaatttaaaccctggcaaacattctttagaaaccaagaggaaagaaagaacaaatatcaaaaaagacatagaatttaatattgatacaatttcacctctaaaatggatttgaagaaatgcaactttatatcaaaaaatgtcatctgatttcctttgtttcttttttaaattatgtaatcagatgattttatgtttttttttcaggggagcggaatattggtttcttttacttgttgttttcagttttctctgccattcatgtttcttttttgtgttcagtgtttcaaatacaatttgtatttaaggattttaaaataccaaactgtaactgagtacagtggatcgttttctgttaggatgttaatattatacaatgaaatctataaagtgttgtcaatttgattattgacacatataacatgtttacaaataaactgtggtattgatcaagttactatgaaaaaaaaaaaaaacccggggggggccccggaacccaatccc

SEQ ID NO: 52 - DNA, 3116 bp, Homo sapiens
ggtgataatgaaagtggtggtggtgatggtggtaatactggtggtggtgacattggtggtggtggtgatggtggtgatactggtgatggtggtgatggtggtggcgctggtgaccctgacatggggtccagtagcagtgacagtggatgcaggctcctggtgactgaggagcatctcaggctgrggaggcacctctgatccccgccactgctccttaccccctacagtctctcagcaaacctgctgggcgacagcggactcagatgccttctggaatgtctgccgcagtgcccatctccggtttgcttgatctgagtcacaacagcatttctcaggaaagtgccctgtacctgctggagacactgccctcctgcccacgtgtccgggaggcctcagtgaacctgggctctgagcagagcttccggattcacttctccagagaggaccaggctgggaagacactcaggctaagtgagtgcagcttccggccagagcacgtgtccaggctggccaccggcttgagcaagtccctgcagctgacggagctcacgctgacccagtgctgcctgggccagaagcagctggccatcctcctgagcttggtggggcgacccgcagggctgttcagcctcagggtgcaggagccgtgggcggacagagccagggttctctccctgttagaagtctgcgcccaggcctcaggcagtgtcactgaaatcagcatctccgagacccagcagcagctctgtgtccagctggaatttcctcgccaggaagagaatccagaagctgtggcactcaggttggctcactgtgaccttggagcccaccacagccttcttgycgggcagctgatggagacatgtgccaggctgcrgcagctcagcttgtctcaggttaacctctgtgaggacgatgatgccagttccctgctgctgcagagcctcctgctgtccctctctgagctgaagacatttcggctgacctccagctgtgtgagcaccgagggcctcgcccacctggcatctggtctgggccactgccaccacttggaggagctggacttgtctaacaatcaatttgatgaggagggcaccaaggcgctgatgagggcccttgaggggaaatggatgctaaagaggctggacctcagtcaccttctgctgaacagctccaccttggccttgcttactcacagactaagccagatgacctgcctgcagagcctcagactgaacaggaacagtatcggtgatgtcggttgctgccacctttctgaggctctcagggctgccaccagcctagaggagctggacttgagccacaaccagattggagacgctggtgtccagcacttagctaccatcctgcctgggctgccagagctcaggaagatagacctctcagggaatagcatcagctcagccgggggagtgcagttggcagagtctctcgttctttgcaggcgcctggaggagttgatgcttggctgcaatgccctgggggatcccacagccctggggctggctcaggagctgccccagcacctgagggtcctacacctaccattcagccatctgggcccaggtggggccctgagcctggccaggccctggatggatccccccatttggaagagatcagcttggcggaaaacaacctggctggaggggtcctgcgtttctgtatggagctcccgctgctcagacagatagacctggtttcctgtaagattgacaaccagactgccaagctcctcacctccagcttcacgagctgccctgccctggaagtaatcttgctgtcctggaatctcctcggggatgaggcagctgccgagctggcccaggtgctgccgcagatgggccggctgaagagagtggacctggagaagaatcagatcacagctttgggggcctggctcctggctgaaggactggcccaggggtctagcatccaagtcatccgcctctggaataaccccattccctgcgacatggcccagcacctgaagagccaggagcccaggctggactttgccttctttgacaaccagccccaggccccttggggtacttgatggccccctcaagacctttggaatccagccaagtgatgcacccaaatgatccacctttcgcccactgggataattgactcaggaaagaagagcctcggcagggcgctctgcactccacccaggaggaaggatacgtgtgtcctgctgcagtcctcagggagaacttttttgggaaccaggagctgggtctggacaaaggagtaccctgcattacgtgggatatgtgtgatcaattggggacatgcgacacacaatgagggtgtcatgacaatgcatgacacgtacggttatatgtggcagtgtgaccccttgacatgtggcgttacatgaaagtcagtgtggcacgtgttctgtggcatgggtgctggcatcccaagtagcaggatacatgattgttggtctatatatgacacatgacaaatgtccatgtcacaggactcatggctggccagatgacctcaggctggcccaagatctaatttattaatttttaaagcaaatacatatttatagattgtgtgtatggagcagctaagtcaggaaaagtcttccgcccgagctgggaggggagagtgtccatgcactgaccagtccaggggctcaagggccagggctctggaacaagccagggactcagccattaagtcccctcctgcctcaatcctcagcctacccatctataaacttgatgactcctcccttacttacatactagcttccaaggacaggtggaggtagggccagcctggcgggagtggagaagcccagtctgtcctatgtaagggacaaagccaggtctaatggtactgggtagggggcactgccaagacaataagctaggctactgggtccagctactactttggtgggattcaggtgagtctccatgcacttcacatgttacccagtgttcttgttacttccaaggagaaccaagaatggctctgtcacactcgaagccaggcttgatcaataaacacaatggtattccaaaaaaaaaaaaaaaaaaaaaaaaaaaaaaaaaaaaaaactcgag

SEQ ID NO: 53 - DNA, 2679 bp, Homo sapiens
ccacgcgtccgcctcagcggccgggcccacggccccgagcagccatgctgggcgcgcgggcctggttgggccgcgtccttctgctgccccgcgccggtgcaggcctcgccgcaagccgcaggtgtcctggagtctggcccaggacctggccccacaggagtcccagcaggggtagctcctcccgggacaaggaccgaagtgcgacggtcagtagttcagtgcccatgcctgctggagggaaaggaagccatccttcatctacaccccagagggtccccaaccgcctgatccacgagaagtcaccatacctcctacaacatgcctacaatcctgtggactggtacccctggggacaggaagccttcgacaaggccaggaaggaaaacaagccgattttcctctcagtcgggtactccacctgccactggtgccacatgatggaagaggagtccttccagaatgaggagattggccgcctgctcagtgaggactttgtgagtgtgaaggtagaccgtgaggagcggcctgacgtggacaaggtgtacatgacgttcgtgcaggccaccagcagcggcgggggctggcccatgaatgtgtggctgactcccaacctccagccctttgtcgggggcacctatttccctcctgaggatggcttgacccgagtcggcttccgcacagtgttgctgagaatacgagaacagtggaaacagaacaagaacaccctgctagaaaatagccagcgtgtcaccactgccctgctggcccgatcagagatcagcgtgggtgaccgccagctgccgccctctgccgccaccgtgaacaatcgctgcttccagcagctggatgagggctatgatgaggaatacggtggcttcgctgaggcccccaagtttcccacgccggtgatcctgagcttcctgttctcctactggctcagccatcgactgactcaggatggctctcgggcccagcagatggccttgcataccctgaaaatgatggctaacgggggcatccgggaccatgtggggcagggctttcaccgctactccacagaccgccagtggcacgtccctcactttgagaagatgctctatgaccaggcacagctcgctgtggcctattcgcaggccttccagctctctggtgatgaattctactctgacgtggccaaaggcatcctgcagtacgtggctcggagcctgagccaccggtccggaggcttctatagcgcagaagatgcagactcgcccccagagcggggccagcggcccaaagagggcgcctactatgtgtggacggtcaaagaggttcagcagctcctcccggagcctgtgttgggtgccaccgagccgctgacctcaggccagctcctcatgaagcactacggcctcacagaggctggtaacatcagccccagtcaggaccccaagggggagctgcagggccagaatgtgctgaccgtccggtactcgctggagctgactgctgcccgctttggcttggatgtggaggccgtgcggaccttgctcaattcagggctggagaagctcttccaggcccggaagcatcggcccaagccgcacctggacagcaagatgctggctgcctggaatggcttgatggtgtcaggctatgctgtgactggggctgtcctgggccaagacaggctgatcaactatgccaccaatggtgccaagttcctgaagcggcacatgtttgatgtggccagtggccgcctgatgcggacctgctacaccggccctggggggactgtggagcacagcaacccaccctgctggggcttcctggaggactacgccttcgtggtgcggggcctgctggacctgtatgaggcctcacaggagagtgcgtggctcgagtgggctctgcggctgcaggacacacaggacaggctcttttgggactcccagggtggcggctacttctgcagtgaggctgagctgggggctggcctgcccctgcgtctgaaggacgaccaggatggagcagagcccagcgccaattccgtgtcagcccacaacctgctccggctgcatggcttcacgggccacaaggactggatggacaagtgtgtgtgcctattgaccgccttttccgagcgcatgcgtcgtgtcccggtggcgttgcccgagatggtccgcgccctctcagcccagcagcagaccctcaagcagatcgtgatctgtggagaccgtcaggccaaggacaccaaggccctggtgcagtgcgtccactctgtctacattcctaacaaggtgctgattctggctgatggggacccctcgagcttcctgtcccgccagctgcctttcctgagtaccctccgacggttggaagaccaggccactgcatatgtgtgtgagaatcaagcctgctcagtgcccatcactgatccctgcgaattacgaaaactactacatccatgactgccccaacccccttggggtggggcagaaggtgaagcatcccaactgactagagactcaggccctgcagggccctatagaacctgtggccatccctgagcaccctgccaccaggtgacctcggccatactcactgccccccttgggcacccactcaccctagaataaacttaacagtgtcccgtggtaaaaaaaaaaaaaaaaaaaaaaaaaaaagggcggccgc

SEQ ID NO: 54 - DNA, 1266 bp, Homo sapiens
tcgacccacgcgtccgttttcagcaggattttcctttcagtgaaacataatttgacttgaaaggaacccagggaaaagtgtccaggtgtgagcatgagcgggtagaggtgtgcccttgtttgcttcaggctgtctgcttttcgcccctgactgttttttctgtttctggccatggaggaagagaaagatgacagcccacaggctgacttctgcctgggcaccgccctgcactcttggggactgtggttcacggaggaaggttcaccgtccaccatgctgacggggattgcagttggagccctcctggccctggccttggttggtgtcctcatccttttcatgttcagaaggcttagacaatttcgacaagcacagcccactcctcagtaccggttccggaagagagacaaagtgatgttttacggccggaagatcatgaggaaggtgaccacactccccaacacccttgtggagaacactgccctgccccggcagcgggccaggaagaggaccaaggtgctgtctttggccaagaggattctgcgtttcaagaaggaatacccggccctgcagcccaaggagcccccgccctccctgctggaggccgacctcacggagtttgacgtgaagaattctcacctgccatcggaagttctgtacatgctgaaaaacgttcgggtcctgggccactttgagaagccgctgttcctggagctttgcaaacacatcgtctttgtgcagctgcaggaaggggagcacgtcttccagcccagggagccggaccccagcatctgtgtggtgcaggacgggcggctggaggtctgcatccaggacactgacggcaccgaggtggtggtgaaagaggttctggcgggagacagcgtccacagcctgctcagcatcctggacatcatcaccggccatgctgcaccttacaaaacggtctccgtccgcgcggccatcccgtcctccatcctccggcttccagctgcggcttttcatggagtttttgagaaatatccggaaactctggtgagggtggtgcagatcatcatggtgcggctgcagagggtgacctttctggctctgcacaactacctcggcctgaccacagagctcttcaacgctgagagccaggccatccctctcgtgtctgtagccagtgtggctgccgggaaggccaagaagcaggtgttctatggcgaagaagagcggcttaaaaagccaccgcggctccaggagtcctgtgactcagatcacgggggc

SEQ ID NO: 55 - DNA, 370 bp, Homo sapiens
ggcacgagttgcggtgaaccagaattataacagtgagctcatctgactgttttaggatgtacagcctagtgttaacattcttggtatctttttgtgccttatctaaaacatttctcgatcactggtttcagatgttcatttattatattcttttcaaagattcagagattggcttttgtcatccactattgtatgttttgtttcattgacctctagtgataccttgatctttcccactttctgttttcggattggagaagatgtaccttttttgtcaactcttacttttatcagatgatcaactcacgtatttggatctttatttgttttctcaaataaatatttaaggttaaaaaaaaaaaaaaaaaaa

SEQ ID NO: 56 - DNA, 1999 bp, Homo sapiens
  misc_feature (532)..(532): n equals a,t,g, or c
  misc_feature (1490)..(1490): n equals a,t,g, or c
gcacctgtgaaaaggaggaacgtcatcccccatgatattggggacccagatgatgaaccatggctccgcgtcaatgcatatttaatccatgatactgctgattggaaggacctgaacctgaagtttgtgctgcaggtttatcgggactattacctcacgggtgatcaaaacttcctgaaggacatgtggcctgtgtgtctagtaagggatgcacatgcagtggccagtgtgccaggggtatggttggtgtctgggaagagcctagctggttgttgcctttcctcggtacctaggtcttcaacatcttggtccctctctaggctgtgatggaatctgaaatgaagtttgacaaggaccatgatggactcattgaaaatggaggctatgcagaccagacctatgatggatgggtgaccacaggccccaggttagcgggtaggggtttccaggaggcctgaggtgagaaactgggcaacaagggattgtagggctcaagaaagaatgactcattgtctattacacggcatgggancagctggagctgccagtctgacccccaaacccatgtccctgatcagtgcttactgtggagggctgtggctggcagctgtggctgtgatggtccagatggctgctctgtgtggggcacaggacatccaggataagttttcttctatcctcagccggggccaagaagcctatgagagactgctgtggaatggtgagttcggggagcctaagtagtcttaaggcagctgagaggacaccaggagccttatttttctcttcctcgactccaggccgctattacaactatgacagcagctctcggcctcagtctcgtagtgttatgtctgaccagtgtgctggacagtggttcctgaaggcctgtggtaggcgagaaggagacactgaggtgtttcctacccaacatgtggtccgtgctctccaaactatctttgagctgaacgtccaggcctttgcaggaggggccatgggggctgtgaatgggatgcagccccatggtgtccctgataaatccagtgtgcagtctgatgaagtctgggtgggtgtggtctacgggctggcagctaccatgatccaagaggtaatgcactccttttcccatctctccaccatctgtatcctggcccagaaaacttcctcaaccaccaaatttcttcaaggcataacccaatgccatcttgtccgtctataaagcctcccatttttccctggtatgcattccagctcctgccttcaggcttctgtctgtgggtcatagttatctcctccacttgctgggagctccttgaaggcaaagactctactgcctccatctatccagtggaagtggctcttcagagggtgccaagttagtatgtatgactgtcatctctcccaacagggcctgacttgggagggcttccagacagctgaaggctgctaccgtaccgtgtgggagcgcctgggtctggccttccagaccncagaggcatactgccagcagcgagtgttccgctcactggcctacatgcggccactgagcatatgggccatgcagctagccctgcaacagcagcagcacaaaaaggcctcctggycaaaagtcaaacagggcacaggactaaggacagggcctatgtttggaccaaaggaagccatggcaaacctgagcccagagtgagccgtctgaactgtggragggaagtgctaacagcccagcctccagcctggcctttcctccttccctctgaacctcctgcaaccctgagccatcaggacaatcataccccttcccttctctccacccaattgtgccagtaaatgggggttgagggtgacctaggcagcattagaatcacttatttatttctttcctcacctgttccctgactgcgtgaaatgttcagggaggtcagttgatttccccaggtacattcatggtgtgacagacacatgggtacaaataaaagacccagaaagccaaaaaaaaaaa

SEQ ID NO: 57 - DNA, 1021 bp, Homo sapiens
gcctcctcatgcctttgctgggtatgggcatgttagggggaaggtcattgctgtcagaggggcactgactttctaatggtgttacccaaggtgaatgttggagacacagtcgcgatgctgcccaagtcccggcgagccctaactatccaggagatcgctgcgctggccaggtcctccctgcatggkatgcagcccctcccatgtttctggccactttgtcctttctcctcccgtttgcacatccctttggaactgtttcctgtgagtacatgctggggtctcccctttcttcccttgctcaggtgaatctcagccccttctcccacccaaaggttcacatggatcctaactactgccacccttccacctccctgcacctgtgctccctggcctggtcctttaccaggcttctccaccctcccctatctccaggtatttcccaggtggtgaaggaccacgtgaccaagcctaccgccatggcccagggccgagtggctcacctcattgagtggaagggctggagcaagccgagtgactcamctgctgccctggaatcagccttttcctcctattcagacctcagcgarggcgaacaagaggctcgctttgcagcaggagtggctgagcagtttgccatcgcggaagccaagctccgagcatggtcttcggtggatggcgaggactccactgatgactcctatgatgaggactttgctgggggaatggacacaggtgagggacatcctgggctagggctgtggtggacccacctgatagaccttggcattctttcagagccacatccagaacactctcagcctttgcaaggggagggagagggacagactcagtccaggcaggcctggacactccagggacaggaaggctgtccacactcatgggtgggaaatgagcagacagaaatggattcgttcctttcccacaggtgctgaggcttctctgcctgtctgcacagttgtgccttgcagtcctcaaaaaaaaaaaaaaaaaaaaaactcga

SEQ ID NO: 58 - DNA, 1636 bp, Homo sapiens
  misc_feature (424)..(424): n equals a,t,g, or c
  misc_feature (823)..(823): n equals a,t,g, or c
  misc_feature (960)..(960): n equals a,t,g, or c
gaattcggcacgagttgaaattgaaaatcaagataaaaatgttcacaattaagctccttctttttattgttcctctagttatttcctccagaattgatcaagacaattcatcatttgattctctatctccagagccaaaatcaagatttgctatgttagacgatgtaaaaattttagccaatggcctccttcagttgggacatggtcttaaagactttgtccataagacgaagggccaaattaatgacatatttcaaaaactcaacatatttgatcagtctttttatgatctatcgctgcaaaccagtgaaatcaaagargaagaaaaggaactgagaagaactacmtataaactacaagtcaaaaatgaagaggtaaagaatatgtcacttgaactcaactcaaaacttgaaagcctcctagnagaaaaaattctacttcaacaaaaagtgaaatatttagaagagcaactaactaacttaattcaaaatcaacctgaaactccagaacacccagaagtaacttcacttaaaacttttgtagaaaaacaagataatagcatcaaagacyttctccagaccgtggaagaccaatatwaacaattaaaccaacagcatagtcaaataaaagaratagaaaatcagctcagaaggactagtattcaagaacccacagaaatttctctatcttccaagccaagagcaccaagaactactccctttcttcagttgaatgaaataagaaatgtaaaacatgatggcattcctgctgaatgtaccaccatttataacagaggtgaacatacaagtggcatgtatgcatncagacccagcaactctcaagtttttcatgtctactgtgatgttatatcaggtagtccatggacattaattcaacatcgaatagatggatcacaaaacttcaatgaaacgtgggagaactacaaatatggttttgggnaggcttgatggagaattttggttgggcctagagaagatatactccatagtgaagcaatctaattatgttttacgaattgagttggaagactggaaagacaacaaacattatattgaatattctttttacttgggaaatcacgaaaccaactatacgctacatctagttgcgattactggcaatgtccccaatgcaatcccggaaaacaaagatttggtgttttctacttgggatcacaaagcaaaaggacacttcaactgtccagagggttattcaggaggctggtggtggcatgatgagtgtggagaaaacaacctaaatggtaaatataacaaaccaagagcaaaatctaagccagagaggagaagaggattatcttggaagtctcaaaatggaaggttatactctataaaatcaaccaaaatgttgatccatccaacagattcagaaagctttgaatgaactgaggcaaatttaaaaggcaataatttaaacattaacctcattccaagttaatgtggtctaataatctggtattaaatccttaagagaaagcttgagaaatagattttttttatcttaaagtcactgtctatttaagattaaacatacaatcacataaccttaaaaaaaaaaaaaaaaaaactcgaggggggcccggtacccaattcgccgg

SEQ ID NO: 59 - DNA, 1046 bp, Homo sapiens
  misc_feature (483)..(483): n equals a,t,g, or c
agcaagttcacagtagaaggaggttgagatctttcttttatgtgagaaatctttgaatctcattcatgcgatcagagttgtagccaatttttgaaaaccttattttcaaaggaaataaatgattcactgtaggattcctttaaatatcaagcatcaccagtatatgctttgatggtatatgtatataacttaaagttctttcaaaagcctgatacagaaacgtgtccccagtttggtagcaatgtggaaaacctggctagagatgatatggagctgtccctcagaaagcaaagccatgcctggaatccctaataggctgcttagttgtgaacctgtttgatttgccttaagcctctatccagaaacctgcccgcttccgtctggttaagaagccagtggtggatattttctttgttaacattagaaatgcaaacattcccttgtcaaccaagaatactcaaagctacttgtattggaaatggncagaaggcctaaatccaaatttcttattttttataatttaccatagaagttttgtgattaaattcttacttctgccagtggaggtttatgcctgaaagtcatggggtcctgtctgtaaatagacctaaagagaagtgcagtatttattctttgtaggcataatgtgtttgtcactgacaagcattcatattcatcccactagtcttttattgcagtcttttattgtcattttcagccttatgttggagagctttgctttctcatcatgttcacattgtcttaagttttgtgagcttctgagaaagagcttggtaaaggtttaaaggggactttgttccaccagggagcattttatttgggcgtctcacccttttctaatgaaagctgttgtaagccacctctgacttggaaattctgaaagtatgaatattttttatatcttaattgtaaaatgccagttctccattatttagatgaatagtagaacactgcaccctttgtgcagtgtttttgtttctctactgcattcctacccccaccaaaaaaaaaaaaaaaaaactcga

SEQ ID NO: 60 - DNA, 1000 bp, Homo sapiens
agcggcgggcgcaggacgtgcactatggctcggggctcgctgcgccggttgctgcggctcctcgtgctggggctctggctggcgttgctgcgctccgtggccggggagcaagcgccaggcaccgccccctgctcccgcggcagctcctggagcgcggacctggacaagtgcatggactgcgcgtcttgcagggcgcgaccgcacagcgacttctgcctgggctgcgctgcagcacctcctgcccccttccggctgctttggcccatccttgggggcgctctgagcctgaccttcgtgctggggctgctttctggctttttggtctggagacgatgccgcaggagagagaagttcaccacccccatagaggagaccggcggagagggctgcccagctgtggcgctgatccagtgacaatgtgccccctgccagccggggctcgcccactcatcattcattcatccattctagagccagtctctgcctcccagacgcggcgggagccaagctcctccaaccacaaggggggtggggggcggtgaatcacctctgaggcctgggcccagggttcaggggaaccttccaaggtgtctggttgccctgcctctggctccagaacagaaagggagcctcacgctggctcacacaaaacagctgacactgactaaggaactgcagcatttgcacaggggaggggggtgccctccttcctagaggccctgggggccaggctgacttggggggcagacttgacactaggccccactcactcagatgtcctgaaattccaccacgggggtcaccctggggggttagggacctatttttaacactagggggctggcccactaggagggctggccctaagatacagacccccccaactccccaaagcggggaggagatatttattttggggagagtttggaggggagggagaatttattaataaaagaatctttaactttaaaaaaaaaaaaaaaaactcgagggggggccc

SEQ ID NO: 61 - DNA, 1090 bp, Homo sapiens
  misc_feature (8)..(8): n equals a,t,g, or c
  misc_feature (28)..(28): n equals a,t,g, or c
  misc_feature (43)..(43): n equals a,t,g, or c
  misc_feature (54)..(54): n equals a,t,g, or c
  misc_feature (95)..(95): n equals a,t,g, or c
  misc_feature (545)..(545): n equals a,t,g, or c
  misc_feature (863)..(863): n equals a,t,g, or c
cattgacntcaatgggagtttgttttgncacccaaaatccaangggactttccnaaattgtcgtaaccaactcccccccattgaccccaaatggncggtaggcgttgtacgggtgggaggtctatataagcagagctcgtttagtgaaccgtcaagatccgcctggagacgccatccacgctgttttgaccctccatagaagacaccgggaccgatccagcctccggactctagcctaggcttttgcaaaaagctatttaggtgacactatagaaggtacgmctgcaggtaccggtccggaattcccgggtcgacccacgcgtccgccagcctggaggcccagacgtggcgcagcgactcggaggttcgcctccagcttgcgcatcatctgcggccgggtcccgatgagcctcctgttgcctccgctggcgctgctgctgcttctcgcggcgcttgtggscccagccamrgccgccactgcctaccggccggactggaaccgtctgagcggcctaacccgcgcccgggtagagacctgcgggggnatgacagctgaaccgcctaaaggagagkgaaggctttcgtcacgcaggacattccattctatcacaamctggtgatgaaacacctccctggggccgaccctgagctcgtgctgctgggccgccgctacgaggaactagagcgcatcccactcagtgaaatgacccgcgaagagatcaatgcgctagtgcaggagctcggcttctaccgcaaggcggcgcccgacgcgcaggtgccccccgagtacgtgtgggcgcccgcgaagcccccagaggaaacttcggaccacgctgacctgtaggtccgggggcgcggcgganctgggacctacctgcctgagtcctggagacagaatgaagcgctcagcatcccgggaatacttctcttgctgagagccgatgcccgtccccgggccagcagggatggggttggggaggttctcccaaccccactttcttccttccccagctccactaaattccctcctgccttaaaaaaaaaaaaaaaaaaaaaaaaaaaaaaaaaaaaaaaaaaaaaaaaaaaaaaa

SEQ ID NO: 62 - DNA, 1381 bp, Homo sapiens
ggcacgagcaaagccgaggagaaggccttgaagagagtccggaggaaaatcaagaacaagatctcagcccaggagagccgtcgtaagaagaaggagtatgtggagtgtctagaaaagaaggtggagacatttacatctgagaacaatgaactgtggaagaaggtggagaccctggagaatgccaacaggaccctgctccagcagctgcagaaactccagactctggtcaccaacaagatctccagaccttacaagatggccgccacccagactgggacctgcctcatggtggcagccttgtgctttgttctggtgctgggctccctcgtgccctgccttcccgagttctcctccggctcccagactgtgaaggaagaccccctggccgcagacggcgtctacacggccagccagatgccctcccgaagcctcctattctacgatgacggggcaggcttatgggaagatggccgcagcaccctgctgcccatggagcccccagatggctgggaaatcaaccccggggggccggcagagcagcggccccgggaccacctgcagcatgatcacctggacagcacccacgagaccaccaagtacctgagtgaggcctggcctaaagacggtggaaacggcaccagccccgacttctcccactccaaggagtggttccacgacagggatctgggccccaacaccaccatcaaactctcctaggccatgccaagacccaggacataggacggacccctggtacccagaagaggagttcttgctcactaacccggatccgcctcgtgcccctgcctcctggagcttcccattccaggagaaaaggctccacttcccagcccttccttgcccctgacatttggactcttcccttgggccgaccactctgttctcattctccttcccaccaacatccatccgtccttctcagacaaaccactcactgggtaccccacctcctctctcatatgcccaacacgaccactgcctccctgcccccacacctgcacccaaacagacacatcaacgcaccccactcacagacaccccttaccccacccccactgtacagagaccaagaacagaaattgtttgtaaataatgaaccttattttttattattgccaatcccctaagatattgtattttacaaatctccctcttcccttcgcccctcccttgttttatattttatgaagttagtgcgggctttgctgctccctggcccaggaaagagggactacctgaccctcacctggcacccccctgctgctgcccaagccgctgggcctttttaattgccaaactgctctcttcatcagctcagcacatgctttaagaaagcaaaaccaaaaaaaaaaaaaaaaaa

SEQ ID NO: 63 - DNA, 1345 bp, Homo sapiens
tctacctcttgtcctccccccaacaccaccaccaccctggctcccctccctcatgaccgcctggatcctcctgcctgtcagcctgtcagcgttctccatcactggcatatggactgtgtatgccatggctgtgatgaaccaccatgtatgccctgtggagaactggtcctacaacgagtcctgccctcctgaccctgctgagcaagggggtcccaagacctgctgcaccctggacgatgtccccctcatcagtggccctgatctgcctcctgcgctacgggcagctcctggagcagagtcggcactcttgggttaacaccacggcactcatcacaggctgcaccaacgctgcgggcctcttggtggttggcaactttcaggtggatcatgccaggtctctgcactacgttggagctggcgtggccttccctgcggggctgctctttgtttgcctgcactgtgctctctcctaccaaggggccaccgccccgctggacctggctgtggcctatctgcgaagtgtgctggctgtcatcgcctttatcaccctggtcctcagtggagtcttctttgtccatgagagttctcagctgcaacatggggcagccctgtgtgagtgggtgtgtgtcatcgatatcctcattttctatggcaccttcagctacgagtttggggcagtctcctcagacacactggtggctgcactgcagcctacccctggccgggcctgcaagtcctccgggagcagcagcacctccacccacctcaactgtgcccccgagagcatcgctatgatctaaggtctggggagggtggctggcccggcctccacagcaccccaccccatatcttctttccatttattttgtaccaaaaacaattttgagaaagtattctgttgggatctgggcttcctcacttctggagaagtggccatcccatgcccacctgtgccatggaggagtgggccctgccagctgccacagctgcatgacctgcttccccaccccacggtgtcgttttgtttttaaaggtcacctgtcctcactcacccagccagcccttcaggtgccttctactcccagtgccaaagccagaccactggggtttcctgctgcaggaattgggggctgggaacagcagaggggatagaagtctggtggaggtggagtgggcacgccttagctacggaaaggcccatttctgggcccactgagctgcactgggattcttcactctgcccctcacttcctttagggcaaataacacagcagaaccacgtgggtattttagtacttttttttatattaaaagaattctaatttgcaaaaaaaaaaaaaaaaaa

SEQ ID NO: 64 - DNA, 1323 bp, Homo sapiens
  misc_feature (1086)..(1087): n equals a,t,g, or c
gctgaagatggggtccctcgcacggcacggtccatgtccctcacgctgggaaagaatatgcctcgccggaggtcagcgttgctgtggttcctaagtttaatgccctgaatctgcctggccaaactcccagctcatcatccattccctccttaccagccttgtcggaatcacccaatgggaaaggcagcctacctgtcacttcagcactgcctgcacttttggaaaatggaaagacaaatggggacccagattgtgaagcctctgctcctgcgctgaccctgagctgcctgggaggagcttagtcaggagaccaaggccaggatggaggaagaagcctacagcaagggattccaagaaggtytaaagaagaccaaagaacttcaagacctgaaggaggaggaggaagaacagaagagtgagagtcctgaggaacctgaagaggtagaagaaactgaggaagaggaaaagggcccaagaagcagcaaacttgaagaattggtccatttcttacaagtcatgtatcccaaactgtgtcagcactggcaagtgatctggatgatggctgcagtgatgctggtcttgactgttgtgctggggctctacaattcctataactcttgtgcagagcaggctgatgggccccttggaagatccacttgctcggcagccccagggactcctggtggagctcaggactccagcatgagcagcctacagagcagtaggaaacctcacacctagccagtgccctgctctgagacactcagactaccaccctttccccaagtataacgtcaggcccaagtgtggacacactgccgcccatcccatcaggtcatgaggaagggttcttttaacactcggcacttctgtgggagctattcatacacagtgacttgatgttcttggaggatcaacaaaactgccctgggaaagcatccagtggatgaagaagtcaccttcaccaaggaactctattggaagggaaggtctcctgcccctagctcaggtggctggggagaactaaaacaccttcactggtggttgggggtaaggagcggggcacgggggaggaggaggtagggnncagtaaaaaacttactctcttttttcctctctgtaattggttatcaggaagaatttgcttaatgactaacaccctaagcatcagacctggaatttggagttgcaaagtgactatcttcccatttcccatctcattttcaataacttcagcctcccattctttcctttggaatgagagtttctttttacagaagtaggaaaggcttctcagaaaaaaaaaaaaaaaaaaaaactcga

SEQ ID NO: 65 - DNA, 1271 bp, Homo sapiens
ggggctgggccctgctcaggtggctctctccttgcagggaccggcgatgctctgcaggctgtgctggctggtctcgtacagcttggctgtgctgttgctcggctgcctgctcttcctgaggaaggcggccaagcccgcagagaccccacggcccaccagcctttctggggctcccccaacaccccgtcacagccggtgtccacccaaccacacagtgtctagcgcctctctgtccctgcctagccgtcaccgtctcttcttgacctatcgtcactgccgaaatttctctatcttgctggagccttcaggctgttccaaggataccttcttgctcctggccatcaagtcacagcctggtcacgtggagcgacgtgcggctatccgcagcacgtggggcaggtggggggatgggctagggccggcactgaagctggtgttcctcctaggggtggcaggatccgctcccccagcccagctgctggcctatgagagtagggagtttgatgacatcctccagtgggacttcactgaggacttcttcaacctgacgctcaaggagctgcacctgcagcgctgggtggtggctgcctgcccccaggcccatttcatgctaaagggagatgacgatgtctttgtccacgtccccaacgtgttagagttcctggatggctgggacccagcccaggacctcctggtgggagatgtcatccgccaagccctgcccaacaggaacactaaggtcaaatacttcatcccaccctcaatgtacagggccacccactacccaccctatgctggtgggggaggatatgtcatgtccagagccacagtgcggcgcctccaggctatcatggaagatgctgaactcttccccattgatgatgtctttgtgggtatgtgcctgaggaggctggggctgagccctatgcaccatgctggcttcaagacatttggaatccggcggcccctggaccccttagacccctgcctgtatagggggctcctgctggttcaccgcctcagccccctcgagatgtggaccatgtgggcactggtgacagatgaggggctcaagtgtgcagctggccccataccccagcgctgaagggtgggttgggcaacagcctgagagtggactcagtgttgattctctatcgtgatgcgaaattgatgcctgctgctctacagaaaatgccaacttggttttttaactcctctcaccctgttagctctgattaaaaacactgcaacccaaaaaaaaaaaaaaaaaa

SEQ ID NO: 66 - DNA, 1408 bp, Homo sapiens
acgcgtccggcggccgggtcccgatgagcctcctgttgcctccgctggcgctgctgctgcttctcgcggcgcttgtggccccagccacagccgccactgcctaccggccggactggaaccgtctgagcggcctaacccgcgcccgggtagagacctgcgggggatgacagctgaaccgcctaaaggaggtgagtttgaaggaagaggtccctagctctgttccccctgagcctcttggggagtgggcaacatggtcccaatgactggggcggggaggggggaaggatccctaggctgagagtctagcctaggctgggagtctagcctgcacctgacttgctttatgacctcactgggcttcagtgtctcgtctgtacctcgagtagactgaggtcatggtctctgatgctctggttcctccccaggtgaaggctttcgtcacgcaggacattccattctagtatccttctgttctgggggaggggaaatgggatgggcacctgggagaatctccacgtaacttcagaaaggggtggcagatggttttcaactgacaagttgaattgattgctagtggctcccagaggattctgaggtggtctccatgttgggtgggcaagagagattgactagtgatgactgccacagaatggagaggagggccctttacttctttgaaccctaattttctcacgtataagcggagaccctggcccctcccgggcacagagtaagctctgagcaaaggaggcaatgctgttcccatcagtaaggctgcggaaaccaccacctccctctgcccaccaccccgctccttaacaccacctccagtcacaacctggtgatgaaacacctccctggggccgaccctgagctcgtgctgctgggccgccgctacgaggaactagaggtgaggccgtgggaggtgggctgggggcgaggccagaggcgaggcccagcctgctgaccccgcccctcctccgcctcagcgcatcccactcagtgaaatgacccgcgaagagatcaatgcgctagtgcaggagctcggcttctaccgcaaggcggcgcccgacgcgcaggtgccccccgagtacgtgtgggcgcccgcgaagcccccagaggaaacttcggaccacgctgacctgtaggtccgggggcgcggcggagctgggacctacctgcctgagtcctggagacagaatgaagcgctcagcatcccgggaatacttctcttgctgagagccgatgcccgtccccgggccagcagggatggggttggggaggttctcccaaccccactttcttccttccccagctccactaaattccctcctgccttaaaaaaaaaaaaaaaaaaaaaaaaaaaaaaaaaaaaaaaaaaaaaaaaaaaaaaaaaaaaaaaaaaaaa

SEQ ID NO: 67 - DNA, 2407 bp, Homo sapiens
ggcacgagtccagaggtcttcaacaggaagatgccagctggcaccactgcactgtgatgggggccctctcctctgctgactctgccgtttctccaggcctccgctcagtgatgagaccaagagatcggagacaagcatggtgctgctgcttctgctgcttctccagaaaatccctgggacacctttgttccagcctggtttcctgggctgggctcaggaaagctgccaaattcagtcctatgttgggtccaagctgcccctgtgctgtttctgtcaagccaggtgtggacattccaagttcatatgcgtgaacaaaagaaaagaggaacccagtggatgtaacagaaccgactccagttgaatgtttagatttttgctaaactgttttctttttcccttttttgctgtggtttgcattcacggcagtagttagcccaggtgtggggaacgagagtgcactgcatgatagcgttctggtgagctgggaaggacccaccactgccactgaggattgttttggaagaaaggaatatttttatcttggggaccagctaagtctctgcagtagtgtgaaattccaaatggttgttttatcattggtttggtttaccaaaaaaaaggcagggaaaaaaaaaaaaaacaaccgtatgagcgcattggcttgtctgccgcaggcacagaagggtagaaagccacagcagggggcagtccagcagactctgactcaactttctaggcacctagcagagaaagataagatcaaaaggtgtttggtttttcttttaatttttattgtagtttttttgggtgggtgggggaagtaaactagactgaagcgatggatttttttttttcttttttttctttagtgtttttccctttgttcttgaacacttttgccctgcagcctcagttttgaattcttttagcaacttggattagaggggcccatatgtcagaagctcccagcacctcctacttgggagaaaagtgagccatctgctggtcaggaagtcctccagagaggcagcttttcccacaatggtggcaggaaactttggggaaagcaggaatggtgtccactgctgcggaggaactgccttcagagaaggtggggctggaaaagggttagaagcctcctagctgggattgtctttgtttcacctttctttaaattagaattacagaagcccctgcccagtgaacagataacaattggtcttatgctcctccctttcccccattttttcttttgctgttttgttttttgttttttgtttgtttgtttgtttttttgagacagagtcatgctctgtcacccgggctggagtgcagtggtgcgatctcagctcactgtaacctccgcctcccgggttcaagcaattatttgcctcagcctcccgagtagctgggattataggcacccgccaccatgtctggcttttagtagagacggggtttcaccatcttggccaggctggtcttggaactcctgacctcgtgagccaccacgcccagcctcttttgctgtttcattgctgacagtgttcaacaatatgccccatctttatatatcctaagaaacactaatcctaggttattgctagccaaaatatttttgtcctgagtagtgtcactgggccaaaagatagatcaggacgacagcctttagttttcctgaaatcaccaggtcaggcacaaggagaaaaggttcctggatactgactaacttgggtgggtctagccaggagaaagacagtaacatgtgttctgtactttctgggaagatccctgaagccatcacagaggctccccaacttctgagtcgcccatctgttgctgtgggagtgtgaacggatcgctgaaggagagggagctttgctctctctaggtgggcaagtttcctgggctctctgtgttgcctccctctggcttcttcctcccgtgccctctccccgtgtgccccagggggatcagggatcctcaccctcctgaggcccagtggggaagaatgaacatggcttcatccaggttaactgatgctgccatttgcccagcctcttccatcccagccctgtcagtgagcccaggtctggtgcaactgctgcaggatgcctgtagtagggaactctggaagtgtattgggctgaggtgggattttccctccccacagtgcactgagcaatggagggtggtgagggagccatgctgctgaattctggttggcatttccccattatgtaaaatggggtgttgggtagggcagactctgcttgggtttggttgtaagataaacctggaggagaagcacagttgtcccattgaattatttgagcaaaaactactgtaaataacttttttgtcttttgtcaaataaaatttttttttgtttttttaaaaaaaaaaa

SEQ ID NO: 68 - DNA, 648 bp, Homo sapiens
ggcacgaggtgttttaaacctcagaaacagatttgagtgtttcagtattatagaaacagtgatgactattcatgctctgctagtctatgcctgcaactccaaatgtttgtggttcagtatttcccacctacatttctgtttggtgacattgctcattttaacaaatatgaccgagtctagtttttctttaaaaggatagtttatgagtaatctttaaaaccatttccataccatctgtatataaccatttcggtagagaacacactacactgaaccctgctttagagctgtgtgttgagctaaaaatataattttttaaaaattgactagcaaaatctatggccacactgagaagcctttgaaaatggcaaatacttttcatcaccaattgcccaattcatctttcttctgcttcctcagccttgtagcaaaggctacacagcagcccacagtccacagtctttttgggaaaattggcctgccaccttctttaagctcagtttatttttgacttactttctttgctgtagttatgaaccttggggcattaaaatcccatggcaaggagcataagagatgttctcgtagctctgcgttgtgtgaaatgtccatcttagttttgttaaaaaaaaaaaaaaaaaaaaaaaa

SEQ ID NO: 69 - DNA, 540 bp, Homo sapiens
ccacgcgtccgacctcctacatttatgagcaaagctcggtttccctttttggctttccctccgctggttctctgcttagaacactcacaggcatccttgggaaccagactccctgtggtcacaccatcctcactcccctcctcctgcaagggaataggatgtggtttcctggagcttggatagaaagaacaggaagggcgttttcatatgcccggcattaaggctttgaagttcttaaaaccccttctagggtgaaaccgttagggaatttcaacgacgtactagaattattgaacaaatgcaatgggaggatcttgccttgatcctgaagcaacaaatacactttaaaatgacgttttagagggaaatgggggaaattgaatatggactgggaactaaatgattgaaagtagttttgttaatcttgttggtataatattttgtagttctgtttttaaactgctgcagtgtttatggccagagtctaaatgtttacgagttgctttgcttttaaaatattccaacaaaaaaaaaaaaaaa

SEQ ID NO: 70 - DNA, 1088 bp, Homo sapiens
ggcacgagctaagccaaccgcactgaaggagtggggagaagagcatacgccaggagcctcctgcctcaaagtgctcccctaagtcttcttcctcctgtgctgacctcagggtggtctgacccttccctcggtgtgggggatgtggccctctcaggtgcccctacttgctttctgcttccttctggtgaagtccacctccaacattaacctgcccaccccacccccgtcatccctggagaattccagctttgtcgtatctcagagagggaatctaattgtttttggggggcaaaagaaagcaacgtttaggtatcacttctacttggaccgcatgcctttttatagccaaatttctgtgtatttcgtaaatggatttcgcgttaatggatatttatgtaataactagacttctcagattattgtgagaagggtcaggttggaaggggtgtaggaagaggggtgaggggtagtttttttctgttctagttttttttttttttttgtcatctctgaggtggaccttgtcacctgtggttattggggccaaggcggactcagctcccggggagaagggcctctctgccatttcggtcccaaggtgagctgacacaggcgttccttttgggactgtggaagcatcagatgccagcactgactcaggaacagcaagtcagggcagagaggaggagggaggctgtcaggatggaaatacctggacttttctttgcttccctcgcaaactggggtcttctctaccgaacttcccaggatttcatctcaccatatctgtgtgccgcccccagcaccccccacccacctctggggggcccgtgagcgtgtgtcttcattgcctctctccccttggcgtctgatgaccacagcaaagcactgggaatttctactcttcatgcctcatcctgcagcctcgggttcgcattctctctttcttttcctctttccctctttccctgggattgactctgagtggaataccttggcacatccactaggatctactgtctgcactgttttctttgcatgactttatacgcagtaagtatgttgaaaacaaaaaaaaaaaaaaaaaa

SEQ ID NO: 71 - DNA, 2067 bp, Homo sapiens
aattcggcacgaggaaaaacaaaagttttttaaaacaataaaagttaacagtcaataatgtgtttgtcggcaagaagccctctgttaataatggtctaaacaaataagacattgtttttctccaataaagaaatccagaggcaggcagtagctggctttgattcagcctctgactgtcactgtcagggccccaggccccatgagcctttcgtctttcctgcatgttggcttatcttctcatgcttgtgacttcctggttgcaacacggctgctgcaacaccagacatcttgcctgtcttcaaggcaggaaggagggggaaactatcgcctaccagctatttttcttaccttagctcctccatgtcttggatcaaaagcatctctttgaacctctccctcaggcataccctgaaatgctgtggactttaaccttttttctgttgcaaaggtcgctcacatctccctggttgtttggtcttctcttccttggctctagtaacacagcagtctgttgcttcctaggacaacttataatgggacccaaaggggaaagaggatttcccgggcctccaggaagatgtctttgtggacccactatgaatgtgaataacccttcctacggggaatctgtgtatgggcccagttccccgcgagttcctgtggtaaggctttctgggagaagtctggggtggttatccgtgaggacctctcacctgatccttatggggctttgtaaaatcctttcagtaaaactaactttttttcacgactctgagtacaccctcattataggaaattggaaaatatgagaaaatcaagaggaaaaccaaattgtccatttgattgtgagtccattttggggtattttctttgtcttattaaaatctaacttttatatggttgagattatattgtataaaaatgtacttttggccgggcatggtggcttatgcctgtaatcccagcactttgggaggccaaggtgggtggattataaggtcaggagttcgagatcagcctggccgatacagtgaaaccccatctctactaaaaaatatatttaaaaaattagccgggcgcggtggtgcacgcctgttgtctcagctacttgggaggctgaggtgggagaatcgcttgaacccaggaggcggagattgcagtgagctgagatagcaccactgcactccagcctgggcaacagagcgagactccgtctcaaaaaaagttatactttgktatcttagttgaaatcctgccatgtttccacactctataaataacattttaaactttttattagggaaaatttcaaatacatataaaagcagaacaaatagtgtaatgaacccctgtgtacccttcacccaactttaataatgatcaactcatggcgagcctgtgtccttgttttctctttatgcctactcactcctgcccattctctgttgtattattttgaagtaaaccttggacatctgttcatcataatcatccatctagtgtggctgtgctacaatttacttaaccagtgttggtgtttaaccaacctattgcttattggccacccccaagctttttactaatgtaaataatgctgtaaagaatatctttgagtaggataattttaagaatcacttccagatgtcaaattacttgactatatgacattgccttttaacttaagtcttgggaacgttttaaatatttaaaaatgttaaatccgaggccgggcgcggtggctcatgcctgtaatcccagaactttgggaggccgaggtgggtggatcaccttgaggtcaggagctcgcaaccagcctggccaacatggcgaaaccctatctctactaaaaatacaaaagttagccaggcattgtggtgcacacctgtaatcccacctactcgagaggctgaggcaggagaattgcttgaacccgggaggcagaggttgcaatgagccgagatcacgctacttcactccagcctgggcaaccgcgtgagactccatctcaaaaacaaaagaaaaaaaaaaawaaaaaaaccggcacgagggggggcccgtacccaatcg

SEQ ID NO: 72 - DNA, 796 bp, Homo sapiens
gaaaaaaaagaaaaagccaaaaaaaaaagaagaagaagtaccactgctaggatttgaacccagatctagctgactcaagaaccatgccctatctctgtgtccatgttgtcaccacttaatcacttgtattttcccttcaggtttctctgtatgctgtgttctctcccaagagtggtcttccaactcacccctattaaggaagctttcccaagccaggagcttacctttccgtgcacacattgaatgatgatcatttgtcattctgtcttgccttacaaaagaggaccagctccttgaggataggaaccttgtccttatctccctgttcccctgtatgggggccagctcctggcaggtgcatagtaaataatgagtgataaacttgttggaaagaccatgcaggaaccaagcaactcttttcctctgcctcaatgcagttagttcaagaacttactaagaaaagagttgttggccaggcacagtggcacaggcctgtaatcccagcactgtgggagaccaaggcaggcaaattgcttgagctcaggagtttgagaccagcctggacaatatggcgaaaccccatctctatgaaaaattggaaaagtagccaggcatggtggcatgcacctgtggtcccagctactttggaggctgaggtgggcgaatcactttagyccggggaggtcgaggatgcagtgagctgagattgcgccactgaactccagcttgggcgacaaaatgagaccctgtctcaaaaaaaaaaaaaaaagaaaaaaaaaaaaaaaaaaaactcgta

SEQ ID NO: 73 - DNA, 1076 bp, Homo sapiens
ggcacgagcacagcctcaggccctgccccagacctgcagaatcagaaactctggggtgaggcctggttatctgctgtaacagaccttccagtgggttctgatgccctctagagcaggagaaccactagcttagaggttgcagtatgtttggcatcttgccatttgtgttagttcagaggaatggctgacccccatgtctcatttctaagcttcaggcagcttttctcctgggcagctgtcattctgttgaggggaatcctggggactgtggctcctcctccctgtccgtgtgtccttgatctggcagtctacccccttcatctccccgtggaggctccatgcctagaggtggtcttcaaacagaagaatggcaaagataattgtctcgtgttttaccctgaccccattcctttaagagggtcacttcttggcccattcatttaaaaaccaatgtcatagttctgtgattccacctatcagacagtgccacgtccaaggcggggctctcacctccctgggaagagagactgttgctgtctgtgcttcctgtgttctccagtcccacgctcccacggacccacgcccttggagactccctcggtgtcccagggcttctggtgtgttcagagacctccacactcaacgaccactggtgctgcagaagggccggtgcttacattccaattaacagacgcttttcccatctaatgcctcttgccttctcctaacaccacctcgggagtgtttatgtctattctaagtgaatttcactgtgtgaaaaaattcacacctgttgtcccagcgatttgggaggccggggcgggtgtatcatttgagcccaggagtttgaggctagcctgggcaggatggtgaaaccccgtctctataaagaaattttaaaaattagctgggcatagtggcacgtgcctgtagttccatctactggggaggctggggtgggaggatcgcatgagcccgggagtttgaggctgcagtgagctgtgatcgcagcactgcactccagtctgggcaacagagcaagaccctgtctcttaaaaaaaaaaaaaaaaactcga

SEQ ID NO: 74 - DNA, 762 bp, Homo sapiens
ggcacgagtgcctctacgtcatgtcttctccaatgtcatgattcacgtcgtgcagtactgttttggacttgtctattatgtccttgttggcctaactgtgctgagccaagtgccaatggatggcaggaatgcctacataacagggaaaaatctattgatgcaagcacggtggttccatattcttgggatgatgatgttcatctggtcatctgcccatcagtataagtgcccatgttattcgcggcaatctcaggaaaaataaagcaggagtggtcattcactgtaaccacaggatcccatttggagactggtttgaatatgtttcttcccctaactacttagcagagctgatgatctacgtttccatggccgtcacctttgggttccacaacttaacttggtggctagtggtgacaaatgtcttctttaatcaggccctgtctgcctttctcagccaccaattctacaaaagcaaatttgtctcttacccgaagcataggaaagctttcctaccatttttgttttaagttaacctcagtcatgaagaatgcaaaccaggtgatggtttcaatgcctaaggacagtgaagtctggagcccaaagtacagtttcagcaaagctgtttgaaactctccattccatttctataccccacaagttttcactgaatgagcatggcagtgccactcaagaaaatgaatctccaaagtatcttcaaagaataaatactaatggcagaaaaaaaaaaaaaaaaaaaaaaaa

SEQ ID NO: 75 - DNA, 1918 bp, Homo sapiens
gaattcggcacgaggtaggatgagagagaaagaagaataggagatggttaaggttggggcctggagagctgtacagatattgatgctattcgccaatccaggacatgcagaaggagcatgcatcagccccgggcccgcaggaaagagggagccactcaaactaggataatgcacagagggtgttttcacaaaggtgtgagcgtggtgtcggataaaggcaggactaatgcagtaacctagagccagtagcagtggagtgaaggagcttctcccatcacccagccagaagaccaggaggagaacagctacctggaccagaaggagaggtcttgtagagaagctcccttgagaggatccccttctgccaagggacagccaacctaggtggtcttgctgggagcatgacagaggagttaattccccggtttcatgttcctcctttcctccactcctctgagggttactagccaaatccaccgaaggcagccaccaagacatcctcacagatcagcctcccaggacacacagcagggcaaagaaggtggagatggatgggaggggagcaaggagcagatttggaggagtgcagcatggtcctaggagagcgccatccctgctgcccctagctgtgtggccttggccaggttacctaacttctctaatcctcagagagaggttggggctgaatactcaggagtcttcagtggaaaggtggatgccatgggtgtgctgcgatttcctggagaaggtgtagcttagaggggaactggggcaggctgaagagtgagagtcagggtacgaggctggggaggagccaccacacagtcagcagtagcttcctcctctgggatcctctagcattttctctttaacttctcacagaagactttacagattttattgccactgcttccgtgtgcctcccatcagagtgtgagcacctttgttcctcagtccctcaaggccgatgcatggtcagcccttgttagttgagtgaatgaacaaacaacactgaagaagctgcccttgaaaaaccggggcatcgttaagggctttgagcagaggatagaagacagtggagggggaggctcakgaggaagtgggatgtcaagctgtggggcagctgcaagaccttgcatgcatttggtggaaatttcytaggggctaccagggggcaggctgtgcttgggactagaggctagagaggtggggaaggctcagtctctgtgctcaagagacagccctctggacagagcacggcagctcctccatgacacagctgtccacaagcttcggagcacagctccttgttagtgagtggtggtgttaggcaggtggggaggtgggggaagttgaaaggtatcctggggatgagcaaagtctgatttgggggtgaaggggaacatgcaacaatgaacccagttcaatgtttagggcaaacgtttaatgcaggaagcagtgagaggtaagactggagccataagcaggcagaagctcgtggagacccaagtgcccagatgtggacttttccttataggcagtggagctccctgaagggttctgaagcagagaagagcatacatagtcaggtgtgcttcttacctggactactgctgagggatatttaggatgcagcatcctctggatggttgctataataataactattgtgacaaagcttcttcctgtggagctgttgtgtttgcaaatcggaccaaggtcccaggcatccaggccatggagctaagttcctagcccaggtctctggtcagggcataagtcattcagtgtgccaaacctctgaaaggtagcccggcccctttatttaccatactacacacagccagttcaccttctcctcctgagcacctgctcgtgccgaattcgatatcaagcttatcgataccgtcgacctcga

SEQ ID NO: 76 - DNA, 712 bp, Homo sapiens
  misc_feature (1)..(1): n equals a,t,g, or c
  misc_feature (338)..(338): n equals a,t,g, or c
nctggtctatagtgaagttactggccattccaaaggctatggatttgtggaatacatgaaaaaggactttgctgcaaaggctagactggagctattgggtagacagttgggagcatcagcactctttgcacaatggatggatgttaatctattggcttcagagctcattcattctaagtgcctttgtattgataaactccccagtgactacagggattcagaagagctgttgcaaattttttccagtgtccataaacctgtgttttgccagcttgcacaggatgaaggtagttacgttggtggctttgcagtggttgaatatagcactgcggagcagnctggaagaggtccagcaggcagcagacggtatgaccatcaagggcagcaaagtccaggtttccttctgtgctcctggagcgccagggcgaagtacattagcagcattgatagcggctcaacgtgtgatgcacagtaatcaaaagggcttacttccagagccaaatccagtacaaattatgaaaagtttaaacaaccctgccatgttgcaagttcttctacaagcgcccagttatgtggacgagctgttaaaccagccgttcttggaacacctcacagcttgccacatctgatgaatccatccatctctcctgcatttttacatttgaataaagcacatcagaatctttctcatataccactgggcacaacaaca

SEQ ID NO: 77 - DNA, 1816 bp, Homo sapiens
  misc_feature (504)..(504): n equals a,t,g, or c
  misc_feature (1405)..(1405): n equals a,t,g, or c
gcgtggatccaagatggcgacggcgatggattggttgccgtggtctttactgcttttctccctgatgtgtgaaacaagcgccttctatgtgcctggggtcgcgcctatcaacttccaccagaacgatcccgtagaaatcaaggctgtgaagctcaccagctctcgaacccagctaccttatgaatactattcactgcccttctgccagcccagcaagataacctacaaggcagagaatctgggagaggtgctgagaggggaccggattgtcaacacccctttccaggttctcatgaacagcgagaagaagtgtgaagttctgtgcagccagtccaacaagccagtgaccctgacagtggagcagagccgactcgtggccgagcggatcacagaagactactacgtccacctcattgctgacaacctgcctgtggccacccggctggagctctactccaaccgagacagcgatgacaagaagaaggaaagtgatatcaaatgggnctctcgctgggacacttacctgaccatgagtgacgtccagatccactggttttctatcattaactccgttgttgtggtcttcttcctgtcaggtatcctgagcatgattatcattcggaccctccggaaggacattgccaactacamcaaggaggatgacattgaagacaccatggaggagtctgggtggaagttggtgcacggcgacgtcttcaggccccccccagtaccccatgatcctcagctccctgctgggctcaggcattcagctgttctgtatgatcctcatcgtcatctttgtagccatgcttgggatgctgtcgccctccagccggggagctctcatgaccacagcctgcttcctcttcatgttcatgggggtgtttggcggattttctgctggccgtctgtaccgcactttaaaaggccatcggtggaagaaaggagccttctgtacggcaactctgtaccctggtgtggtttttggcatctgcttcgtattgaattgcttcatttggggaaagcactcatcaggagcggtgccctttcccaccatggtggctctgctgtgcatgtggttcgggatctccctgcccctcgtctacttgggctactacttcggcttccgaaagcagccatatgacaaccctgtgcgcaccaaccagattccccggcagatccccgagcagcggtggtacatgaaccgatttgtgggcatcctcatggctgggatcttgcccttcggcgccatgttcatcgagctcttcttcatcttcagtgctatctgggagaatcagttctattacctctttggcttcctgktccttggtttcatcatcctggtggkatcctgktcacaaatcagcatcgtcatggtgkacttccarctgtgtgcagaggnattaccgytggtggtggagaaattycctagtctccgggggctctgcattcwacgtcctggtttatgccatctttwatttcgttaacaagtgactgcagcgccaagcggcatccaccaagcatcaagttggagaaaagggaacccaagcagtagagagcgatattggagtcttttgttcattcaaatcttggatttttttttttccctaagagattctctttttagggggaatgggaaacggacacctcataaagggttcaaagatcatcaatttttctgactttttaaatcattatcattattatttttaattaaaaaaatgcctgtatgcctttttttggtcggattgtaaataaatataccattgtcctacaaaaaaaaaaaaaaaaaaaacttctcggccgcaaggaa

SEQ ID NO: 78 - DNA, 865 bp, Homo sapiens
gctgaatataaggaaatatgtctaatggacaccagttaatactttttaaaactactctttaaaaaaaaaatacgttccccttggttaactgattttttaatccagggtggacattttttcaacctttattaaaaagacaaataaactattttgtagaagatcagactcctacttaactggaagagaaatgtctattaaatgtctctcctctttctctgggtcaagaccatgtaattttatgcttcagagatgaagatactgtttgtttacaaagagtttagtttttaagacatccaaaactctatgctagagcaaaaatcaaatagcaaaggacactagccagaaaatacagtgtgtgtgtgtgcacctgtgtgcctgctgaacaacttgacagtgtaacagataaggtaactgaagatggtggatatttgaattgtattagcttaatgtctacatatctttggccaaaactctattgtcatattagaaacatgttatctttttcatgtttattagtaatttatttttgattctttgttttctttttcgtccaactaaaacaactgtaatgtacttgatacatttatatcaagttctaaagtatttagacaaatccaaatactttgtttttagttttttcctcctttccatcctgttaaccacagtgaaacgctgcagtattttgatttggtcagtgctacggaggaagaccatgaaagctgaattggtctgtgccacccagagtaaacctcttctcttcttctggaaagatggcgtgatgtttttcaaggattctaataaatatcccgcagtcatctcctgaaaaaaaaaaaaaaaaaaaaaaaaaaaaaaaaaaagggcggcc

SEQ ID NO: 79 - DNA, 656 bp, Homo sapiens
  misc_feature (148)..(148): n equals a,t,g, or c
tcgacccacgcgtccgcttcccaatatttctcatttttaaaaatattttttcttacactagaatgttattccttgtcttttctttggktcttttaaaacccttgkttttcttcycttttgggggagmccgaattgtaaatattgrgantwttcagtmccagcaccatgctgaaggaaagwtrggtagctaataccttttttttttttgagacggagtcttgcactccagcctgggcamcaagagcaaaactccatctcaaagatataagtgttttcaactggcgggtaagaaaaactgctgctgttggttctctaacttcttacaacggtggttcccacttaatcttatttaggtcctggagccctaaaaaaaaaatctgaaaaacctgcagtctgtcttcccagaaacacttgtgtgaaacgttctggtgtttttgtgttgagactgggtgacagagcaagactcagtctcaagaaaaaaaaaaaaaagaatatacaccagcctgggcgtggtggctcacgcctgtaatctcagcacttttgggaggccgaaggcaggtggatccacctgaggtcaggattttgagaccagcctgaccaacatggtgaaaccccatccctactaaaaaaaaaaaaaaaaaaaaaaaagggcggcc

SEQ ID NO: 80 - DNA, 1459 bp, Homo sapiens
acgcgtccggcgtctgcagctgcaggggaggaggactgggtccttccctctgaagttgaagtgttggagtccatctatctagatgaactacaggtgattaaaggaaatggcagaacttcaccatgggagatctacatcactttgcatcctgccactgcagaggaccaggattcacagtatgtctgcttcactctggtgcttcaggtcccagcagagtatccccatgaggtgccacagatctctatccgaaatccccgaggactttcagatgaacagatccacacgatcttacaggtgctgggccacgtggccaaggctgggctgggcactgccatgctgtatgaactcattgagaaagggaaggaaattctcacagataacaacatccctcatggccagtgtgtcatctgcctctatggtttccaggagaaggaggcctttaccaaaacaccctgttaccactacttccactgccactgccttgctcggtacatccagcacatggagcaagagctgaaggcacaaggacaggagcaggaacaggaacggcagcatgctacaaccaaacagaaggcagtcggtgtgcagtgtccagtgtgcagagagcccctcgtgtatgatcttgcctcactgaaagcagcccctgaaccccaacagcctatggagctgtaccagcccagtgcagagagcttgcgccagcaagaagaacgcaagcggctctaccagaggcagcaggagcgggggggaatcattgaccttgaggctgagcgaaaccgatacttcatcagccttcagcagcctcctgccccggcggaacctgagtcagctgtagatgtctccaaaggatcccaaccacccagcacccttgcagcagaactatccacctcaccagccgtccaatccactttgccacctcctctgcctgtggcgacccagcacatatgtgagaagattccagggaccaggtcaaatcagcaaaggttgggcgaaacccagaaagctatgctagatccccccaagcccagtcgaggtccctggcgacagcccgaacggaggcacccgaagggaggggagtgccacgcccctaaaggtacccgtgacacccaggaactgccacctcctgaggggcccctcaaggagcccatggacctaaagccagaaccccatagccaaggagttgaaggcccccacaagagaaggggcctggcagctggcaggggcccccaccccgcaggactcgggactgtgttcgctgggagcgctctaaaggccggacacccggttcttcctaccctcgcctgcctcggggccagggagcataccggcctggtactcggagggagtccctgggcctggaatctaaggatggttcctagcaggacttggtggggggaacagggaattggggatgggagggaggcaataaagatatttggccttcaaaaaaaaaaaaaaaaaa

SEQ ID NO: 81 - DNA, 532 bp, Homo sapiens
actcatataagaaagcagtacgccgcagtaccggtccgaattccgggtcgacccacgcgtccgcccacgcgtccgcacctcccttggctgtggggaggggcttccatgccctgtgtggctctcgggtgggctgtcgcaccacactgctcttcctttctcttcacgaatcacgcaagcctcctagtcagttctgatgagataacctggatatcttggttgccggtgaaggatttacatgcttattatggtttttttgttgttgttgttgtttggttttttttttgatgggagcctcagatcgccgctgttgctaatcatccatcttggccctgcccccacatttctgcaaatttaaatatgagatttgtccccttaggtgcacagtccagaccccatccagtccagctccttttaaagccacatggaaagtcagctgagaatggtttgggagcccaggtgcgctgtcttccgccctgccctctccctgaaataaagaacagcttgacagaaaaaaaaaaaaaaaagggcggcc

SEQ ID NO: 82 - DNA, 661 bp, Homo sapiens
gaattcggcacgaggggaaaaggatgctgaacgagagcagaaagcctctttcctttgcttcacgcctttccagtctttattttaaactcgggttccctttctgtggtcgcagcaacctttactccacctgcactgctgctcctgggggctccccaggcctccctctgcctttctacccagtggctgacgggatgcctgtcttgcctggacgcaccactgctctcctgtccctcaccttggcttttgctgtgccctgctctggggttgaagctggcccatgtgtcccccggagtcatggctgctcctcctgggaggcctctgtgtgcgtcacgtcttccacacctgggggcagctggcgagcccgtgctctgttcccctcggctgcttggcacagagytgcagcctgggaytctccgtggacccagactggggattttgccaggggggcgatgggaggagcaggtgctttgcctggcggctgtgtctgcatttctggacgccccagagcacagaagttgccggcactttgaggtcttcctcggcatgtgccagattacatgagtgacggctgggaatatgttttcttttttgtaatggaggcgtgtttcacatatagtaaagctcaccaaaaagtaaaaaaaaaaaaaaaaaaaaaactcga

SEQ ID NO: 83 - DNA, 1050 bp, Homo sapiens
ggcacgagcttttcagcatttgatggttgctgaccactcccactttcacagaaccctcatcaaacagccttctatgatcccaaatgcaactttctatcacatttttatgctcttcttctgcctactcatgaaaatgttggggccatccaggcttccatttttagccctcactttgtgcaggtttatactttattttcagttttgttatctgatctctgactccagcccagaccattcctgactccacatccacatattcatctggcttgctgaataacttctcttggatgtacatgtgtgccttagactcattatgtgcagacatgaagtcatcttttttctctccagacctgcttttcctctcgtattcttctttttggtgaatggtacaattattcagatggaacgtccaagtcaaaagtcgttctagaatcctccctcactcctaatgccacatccaattagtgaccaaatcctatcgattcggccttctaaatacagtcaaaacatttcattcaattcagcgtcactgtcattgctttaatgtagaccttctctattttaccatgatcaagcagaggccctgtatctatattcttctgccttccagtcttgtcatcctactccgcagttaatcccctgagtgctatcctagtgatccttctaacagtacagatttggtcatggattctccagcttgaaatacttcatgtcttttgtgggaacatggatggagatggaggctattatacttagcaaacaaatgcatgaacgaaaaccaaataccacatgttcttacttataagtgggagctaaatgctgacaactcatgaacacaaacaaatgaacagcaaacactggggtctacttgagggtggagtttgggaggagggagagaagcagaaaaggtaactattgggtactgaacttaatacctgggtgattaaataatctgttcaacaggcccccatgatatgagtttacctacgtaacaaaccttcacatgtatccccaaacctaaaataaaagttaaaaaaaaaaaaaaaaaaa

SEQ ID NO: 84 - DNA, 488 bp, Homo sapiens
ggcacgaggagagtagaggctattcatgtaatgtctataaaaaaataacaccaaggctgggattacaggcatgagccactgcacctggccagtttgcttattttgtttggtgcctcctcccatgggagacctcaaggaggtatgcctgccccacagatgccctggaaggacagcttgctgctcctactcagaaccacacctgcagacagaggaggacagacggacactcatttgctgagcacccatgtaacatgaactaagagctgggtggagacaatgaacggtggagccatcgttcccgatgtggagggagaacagctcaagaccacggaacagcctgctctcccgcttcctggcttccgtgcgcttttgtccaatcaggctttttgaccaatcggccaggcgcgctatgtaaatttctgacattttcaaagctgtctttttaataaacctttcagtgtaaaaataaaaaaaaaaaaaaaaaaaaa

SEQ ID NO: 85 - DNA, 515 bp, Homo sapiens
  misc_feature (3)..(4): n equals a,t,g, or c
  misc_feature (7)..(7): n equals a,t,g, or c
  misc_feature (20)..(20): n equals a,t,g, or c
tanntgnatccccccgggcntgccaggaattcggcacgagttacaactggtggaccacacaccaggcactaatcacctggtgaggatttggcatatccaccaaaaaatgcatccgatttaaccaacatctccaccagcgctacggactcctcccaattctgacatctcttgcagacaatactatgctctctacacactgtttagaaatggaaaggtgatctgcactgtatcttgggtttgttggctatgcttcctttgatgacatatattatacagtatatatatacatatatttwwwwwgttagagttctagccattttatttctccgcagggtcctttctcagacattactgcatgctgtatatggcgttagctgtgtgttgatcttctaaaagatgatagagtttactggtaattgtgtaatcagctcctgcctttttattttcttgggttatttacatgtcagagacatttataaaaagtgaaaggataaaaaaaaaaaaaaaaaactcga

SEQ ID NO: 86 - DNA, 1061 bp, Homo sapiens
  misc_feature (138)..(138): n equals a,t,g, or c
  misc_feature (460)..(460): n equals a,t,g, or c
  misc_feature (473)..(473): n equals a,t,g, or c
  misc_feature (1048)..(1048): n equals a,t,g, or c
acaccaatggagacataattgtgggcagactatgacaaccgttgggtcagcatcttctcccctgaggggcaagttcaagaccaagattggagctgggccgcctcatgggccccaagggagtggccgtagaccggaatngacatatcattgtggtcgacaacaagtcttgctgcgtctttaccttccagcccaatggcaaactggttggccgttttgggggccgtggggccactgaccgccactttgcagggccccattttgtggctgtgaacaacaagaatgaaattgtagtaacggacttccataaccattcagtgaaggtgtacagtgccgatggagagttcctcttcaagtttggctcccatggcgagggcaatgggcagttcaatgcccccacaggagtagctgtggactccaatggaaacatcattgtggctgactggggcaacagccgcatccnaggtattcgacanctctggctccttcctgtcctatatcaacacatctgcagaaccactgtatggtccacagggcctggcactgacctcggatggccatgtggtggtggctgatgctggcaaccactgctttaaagcctatcgctacctccagtagctgtacagaggccctgcctggcttgtggagggacagacattggggtgattggacaagagggtctggctgggaggtgggccagacctggcagcactgaatgtgggctgtgggcatgggtgcacccggtgccctccctctcctacccccacccccacggttgcactttatttattcggttcttgctttggtgactgggtgagcctggactgtggtcccaaggatgtgtgcagagcttcaccctacccttcttacacacctccccacccctgtcagtctgctccccatcccccagcctggggccagaacagcctaccccaggacaggagtccctctagttgtctccctaccaccctatacacactgacagagacagcaataccccaccccccatattaaataaatgtcttcaccaagaaaaaaaaaaaaaaaaaanactcgcggcacga

SEQ ID NO: 87 - DNA, 1192 bp, Homo sapiens
ggcacgagaagaagtgctgtggaaaccgtcaggccatgaaccaggctgaccctcggctcagagcagtgtgcttgtggactctcacatctgcagccatgagcagaggcgacaactgcacggatctactcgcactgggaatcccctccataacccaggcctggggactgtgggtcctcttaggggctgtgacgctgctatttctcatctcgctggctgcacacttgtcccagtggaccaggggccggagcaggagccatccggggcagggacgctctggagagtctgtggaagaggtcccgctgtatgggaacctgcattatctacagacaggacggctgtctcaagacccagagccagaccagcaggatccaactcttggaggccctgccagggctgcagaggaggtgatgtgctataccagcctgcagctgcggcctcctcagggtcggatccccggtcctggaacccccgtcaagtactcggaggtggtgctggactctgagccaaagtcccaggcctcgggccccgagccggagctctatgcctcagtatgtgcccagacccgcagggcccgggcctccttcccggatcaggcctatgccaacagccagcctgcagccagctgagatggagggcctggcacagcggggcgtgcactgccccagccccccgtagcaggggcatgactgtttcccaaccagcacccaaagacgggcgccattgccaagtcacaggatgtgatctaccccggacttcctatctgagcttcaagggagacatctcagggcaaagctttcgtgatggaggaggcaaagacagtagccccctccttatttcttttttctatctgttcctcttagcccccaaactcccaggttctcacttccttcttctggagtttaaccagatcctccccacccccgctccctcatagtctacccccacgcctcagtgtctcctcaggcacaggaagtgggcggtgggggaggggtaagggcctgacagtgggtgggtgggtatattcctcaggagtccacagactggagtggacctggaacttagagacgggagggacccgagcctggcttttgacctaagaaccctagcaggagaatacagtctccatcctgctgtctctgtcctgtccccaagttttcaaataaaactttccaaaaagtgaaaaaaaaaaaaa

SEQ ID NO: 88 - DNA, 1064 bp, Homo sapiens
gcggaggggtttctgtgcaggacgggagtctcagagaggagacggatgtgggggagggaggccggccacgcggtggacagagcgagggtgccagggtgacccgaagaccgtcaccacccgacagcaacgcaagtgcctttgaccttgatttggacttttctcccttttgcatttggtgctacagacttgagacaccagcagaagttgtgttcagcccggccccgctgcgcctgtccgggccggggctggcgccggttgtgtttgtgtccaccttgccttctttgcagccaagcagtttttgtggatgggacttacctgcacgccccaggggtctttcaggattcaggatgacttttcttttacaatggtttcctctcggcagagcccgggttgtgggggatctgtgtgggttctcaacgcagatccatcctggggtctcccgggcagggatggctgacctcgagtcccctcccttcccgagaacctgctctgtcccgagggcagctaacaagggctgagccccaggtacaggttgcctcctccacggcaggaatttttaccaaaaccacaagcaaaaaacaaaacagaccaccacgaccaacaacaaagatggggggtarggttttgtaaaggttctgttaggttcatatttttatatcattttgcccataaatgcggaatttgccgtgggaatttgaagacaaatgatctatgtttttatggttttctagggaargtgttctgggggccgggctctctccagctgtgggaggcctgctccctctggggggcaccctgggcagggtgggggggccttgggaggcgcttcttgccaaatgcagacgaggggtgagcctgccagcgtttgcgacgtccccgcacgacaggctcatactttctgaggatcgtgcatagcataggacgtctgaacctttgtacaaatgtgtagatgacatcttgctacagcttttatttgtgaattaaagatgcattgatggttaaaaaaaaaaaaaaaaaaaaaaaaaaaaaaaaaaaaaaaaaaaaaaaaaaaaaagggcggccgc

SEQ ID NO: 89 - DNA, 884 bp, Homo sapiens
  misc_feature (307)..(307): n equals a,t,g, or c
  misc_feature (356)..(356): n equals a,t,g, or c
tcgacccacgcgtccgccggatggttgccacccctcctgctgtaggatggaagcagccatggagtgggagggaggcgcaataagacacccctccacagagcttggcatcatgggaagctggttctacctcttcctggctcctttgtttaaaggcctggctgggagccttccttttgggtgtctttctcttctccaaccaacagaaaagactgctcttcaaagtggagggtcttcatgaaacacagctgccaggagcccaggcacaggctgggggcctggaaaaaggagggcacacaggaggaggganggagctggtaggggagatgctgggctttacctaagtctcgaaacaaggnggcagaataggcagaggcctctccgttccaggcccatttttgacaratggcgggacggaaatgcaatagaccagcctgcaaraaaracatgtgttttgatgacaggcagtgtggccgggtggaacaagcacaggccttggaatcccaatggactgaatcagaaccctaggcctgccatctgtcagccgggtgacctgggtcaattttagcctctaaaagcctcagtctccttatctgcaaaatgaggcttgtgatacctgttttgaagggttgctgagaaaattaaagataagggtatccaaaatagtctacggccataccaccctgaacgtgcctaatctcgtaagctaagcagggtcaggcctggttagtacctggatggggagagtatggaaaacatacctgcccgcagttggagttggactctgtcttaacagtagcgtggcacacagaaggcactcagtaaatacttgttgaataaatgaagtagcgatttggtgtgaaaaaaaaaaaaaaaaaaaaaaaaac

SEQ ID NO: 90 - DNA, 1238 bp, Homo sapiens
ccctcacatcagggaaaatgaccttcactgctgttaacagtaatgkgtccctttcattttctggatcaagccttctcagcggtgggtctggatgtgggtaaactaaggtaaaggggatgatattccacaaactaattatgcacacagaaaatctgtggagcctatcagaccccaagtgtcttgaaatgtttgtagaaacccactaaaatgccccttctctgggtgtgggcccttattgcagctgtctcacagcctgagctgtggtacagagaaatgggggttctccttttattttcattttttttccccaatggcagcttttctcccgttgttttaccttcctatttcccaaacagttcctcttattttgtcttttgcaccagtttctggaggcccttgtcatttcaaaaaggatagtctcttttcttactctggcaaacctgtgagtgattccacaaagatacagtattacttagctawctgaattatgatagaaaaggtcctagttaggttcctatataaagcatttggaagatgaccttgttgcccttgaaacttgaaaatagggattctggggtgaggatacaaagacattgtcttgcatatccataagcaggtcttagagcattattccaaactctagctgtttcagtagttctatgaggattgcaagtcataggtgtgtgtggcatatcagtccatctccctcatctccattctcagtttcttccccacaaaatttggaatcaaagcttttatgacgtttgccaattgcagaacttcttcagctaaggttaatttgacgctatgataaaactgagagatgtcaaaaagcctcttagaaattttaatcttgaaagacttttcagggtatctcattttttaggtgggggtggcaggtgtatttcttttttaacaaataaaaggcatttaagtaaaactaaaatgaaaaaagtaggccttctgacattgtgtacttggtggttctgtccctctgcctgtaacaaatctcatttttgttaccaagaactgtatgaaagaagtaaatccaccccgattctgtatgattaattccatctgtgtttgtcatttctgactggaaaacttcttactccataccttgttcgatatggaggacaaataattggattgtctgataagtctgccaataaactatccagaaatagcaagtgtaaaaaaaaaaaaaaaaaaaaaaaaaaaaaaaaaaaagggcggcc

SEQ ID NO: 91 - DNA, 496 bp, Homo sapiens
tcgacccacgcgtccgaactgacacaatgaaactgtcaggcatgtttctgctcctctctctggctcttttctgctttttaacaggtgtcttcagtcagggaggacaggttgactgtggtgagttccaggacaccaaggtctactgcactcgggaatctaacccacactgtggctctgatggccagacatatggcaataaatgtgccttctgtaaggccatagtgaaaagtggtggaaagattagcctaaagcatcctggaaaatgctgagttaaagccaatgtttcttggtgacttgccagcttttgcagccttcttttctcacttctgcttatacttttgctggtggattcctttaattcataaagacatacctactctgcctgggtcttgaggagttcaatgtatgtctatttctcttgattcacttgtcaataaagtacattctgcaaaagcaaaaaaaaaaaaaaaaaaaaaaaaaaaaaaaaaaaaaaaaa

SEQ ID NO: 92 - DNA, 2352 bp, Homo sapiens
  misc_feature (1)..(1): n equals a,t,g, or c
ncaggcagtgagactggctcgggcgggccgggacgcgtcgttgcagcagcggctcccagctcccagccaggattccgcgcgccccttcacgcgccctgctcctgaacttcagctcctgcacagtcctccccaccgcaaggctcaaggcgccgccggcgtggaccgcgcacggcctctaggtctcctcgccaggacagcaacctctcccctggccctcatgggcaccgtcagctccaggcggtcctggtggccgctgccactgctgctgctgctgctgctgctcctgggtcccgcgggcgcccgtgcgcaggaggacgaggacggcgactacgaggagctggtgctagccttgcgttccgaggaggacggcctggccgaagcacccgagcacggaaccacagccaccttccaccgctgcgccaaggatccgtggaggttgcctggcacctacgtggtggtgctgaaggaggagacccacctctcgcagtcagagcgcactgcccgccgcctgcaggcccaggctgcccgccggggatacctcaccaagatcctgcatgtcttccatggccttcttcctggcttcctggtgaagatgagtggcgacctgctggagctggccttgaagttgccccatgtcgactacatcgaggaggactcctctgtctttgcccagagcatcccgtggaacctggagcggattacccctccacggtaccgggcggatgaataccagccccccgacggaggcagcctggtggaggtgtatctcctagacaccagcatacagagtgaccaccgggaaatcgagggcagggtcatggtcaccgacttcgagaatgtgcccgaggaggacgggacccgcttccacagacaggccagcaagtgtgacagtcatggcacccacctggcaggggtggtcagcggccgggatgccggcgtggccaagggtgccagcatgcgcagcctgcgcgtgctcaactgccaagggaagggcacggttagcggcaccctcataggcctggagtttattcggaaaagccagctggtccagcctgtggggccactggtggtgctgctgcccctggcgggtgggtacagccgcgtcctcaacgccgcctgccagcgcctggcgagggctggggtcgtgctggtcaccgctgccggcaacttccgggacgatgcctgcctctactccccagcctcagctcccgaggtcatcacagttggggccaccaatgcccaggaccagccggtgaccctggggactttggggaccaactttggccgctgtgtggacctctttgccccaggggaggacatcattggtgcctccagcgactgcagcacctgctttgtgtcacagagtgggacatcacaggctgctgcccacgtggctggcattgcagccatgatgctgtctgccgagccggagctcaccctggccgagttgaggcagagactgatccacttctctgccaaagatgtcatcaatgaggcctggttccctgaggaccagcgggtactgacccccaacctggtggccgccctgccccccagcacccatggggcaggttggcagctgttttgcaggactgtgtggtcagcacactcggggcctacacggatggccacagccatcgcccgctgcgccccagatgaggagctgctgagctgctccagtttctccaggagtgggaagcggcggggcgagcgcatggaggcccaagggggcaagctggtctgccgggcccacaacgcttttgggggtgagggtgtctacgccattgccaggtgctgcctgctaccccaggccaactgcagcgtccacacagctccaccagctgaggccagcatggggacccgtgtccactgccaccaacagggccacgtcctcacaggctgcagctcccactgggaggtggaggaccttggcacccacaagccgcctgtgctgaggccacgaggtcagcccaaccagtgcgtgggccacagggaggccagcatccacgcttcctgctgccatgccccaggtctggaatgcaaagtcaaggagcatggaatcccggcccctcaggagcaggtgaccgtggcctgcgaggagggctggaccctgactggctgcagtgccctccctgggacctcccacgtcctgggggcctacgccgtagacaacacgtgtgtagtcaggagccgggacgtcagcactacaggcagcaccagcgaagaggccgtgacagccgttgccatctgctgccggagccggcacctggcgcaggcctcccaggagctccagtgacagccccatcccaggatgggtgtctggggagggtcaagggctggggctgagcttta

SEQ ID NO: 93 - DNA, 1523 bp, Homo sapiens
cagacattgttagctactgagtggcacatcttcagtacgcatggattcgtgggggactcaggcagaggtaaaagtgtgaaacttttcagcattacctaagaagcaaaggctcaattttggctgcttcattcttatctcttctgccacagttctaacgtgcctgatctactgagaccaaggatgaccaatgactcagaagggaaaatgggatttaaacacccaaagatcatggggaatttcagaggtcatgccctccctggaaccttcttttttattattggtctttggtggtgtacaaagagtattctgaagtatatctgcaaaaagcaaaagcgaacctgctatcttggttccaaaacattattctatcgattggaaattttggagggaattacaatagttggcatggctttaactggcatggctggggagcagtttattcctggagggccccatctgatgttatatgactataaacaaggtcactggaatcaactcctgggctggcatcatttcaccatgtatttcttctttgggctgttgggtgtggcagatatcttatgtttcaccatcagttcacttcctgtgtccttaaccaagttaatgttgtcaaatgccttatttgtggaggcctttatcttctacaaccacactcatggccgggaaatgctggacatctttgtgcaccagctgctggttttggtcgtctttctgacaggcctcgttgccttcctagagttccttgttcggaacaatgtacttctggagctattgcggtcaagtctcattctgcttcaggggagctggttctttcagattggatttgtcctgtatccccccagtggaggtcctgcatgggatctgatggatcatgaaaatattttgtttctcaccatatgcttttgttggcattatgcagtaaccattgtcatcgttggaatgaattatgctttcattacctggttggttaaatctagacttaagaggctctgctcctcagaagttggacttctgaaaaatgctgaacgagaacaagaatcagaagaagaaatgtgactttgatgagcttccagtttttctagataaaccttttcttttttacattgttcttggttttgtttctcgatcttttgtttggagaacagctggctaaggatgactctaagtgtactgtttgcatttccaatttggttaaagtatttgaatttaaatattttctttttagctttgaaaatattttgggtgatactttcattttgcacatcatgcacatcatggtattcaggggctagagtgatttttttccagattatctaaagttggatgcccacactatgaaagaaatatttgttttatttgccttatagatatgctcaaggttactgggcttgctactatttgtaactccttgaccatggaattatacttgtttatcttgttgctgcaatgagaaataaatgaatgtatgtattttggtgcaramaaaaaaaaaaaaaaaaaaaaaaaaaaaaaagggcggccgc

SEQ ID NO: 94 - DNA, 1297 bp, Homo sapiens
ccacgcgtccggactgctttacggacattggatgaagccgaagcatttagaatggtgcctggcacacagttggtgcgtgatatggttaagctttgtgtccccacccacatctcatcttgaatgtgacggtttccccggctccctcctgccgccatgtgaagaaggtcgttgcttccccttcaccttccaccaccatgattgccatggatgctccccactccaaagcagccctggacagcattaacgagctgcccgagaacatcctgctggagctgttcacgcacgtgcccgcccgccagctgctgctgaactgccgcctggtctgcagcctctggcgggacctcatcgacctcatgaccctctggaaacgcaagtgcctgcgagagggcttcatcaccaaggactgggaccagcccgtggccgactggaaaatcttctatttcctacggagcctgcataggaacctcctgcgcaacccgtgtgctgaagaggatatgtttgcatggcaaattgatttcaatggtggggaccgctggaaggtggagagcctccctggagcccacgggacagattttcctgaccccaaagtcaagaagtattttgtcacatcctacgaaatgtgcctcaagtcccagctggtggaccttgtagccgagggctactgggaggagctactagacacattccggccggacatcgtggttaaggactggtttgctgccagagccgactgtggctgcacctaccaactcaaagtgcagctggcctcggctgactacttcgtgttggcctccttcgagcccccacctgtgaccatccaacagtggaacaatgccacatggacagaggtctcctacaccttctcagactacccccggggtgtccgctacatcctcttccagcatgggggcagggacacccagtactgggcaggctggtatgggccccgagtcaccaacagcagcattgtcgtcagccccaagatgaccaggaaccaggcctcctccgaggctcagcctgggcagaagcatggacaggaggaggctgcccaatcgccctaccgagctgttgtccagattttctgacagctgtccatcctgtgtctgggtcagccagaggttcctccaggcaggagctgagcatggggtgggcagtgaggtccctgtaccagcgactcctgccccggttcaaccctaccagcttgtggtaacttactgtcacatagctctgacgttttgttgtaataaatgttttcaggccgggcaaaaaaaaaaaaaaaaaaaaaaaaaaaaaaaaa

SEQ ID NO: 95 - DNA, 1432 bp, Homo sapiens
acgagagatttaagtgcagcgtggattttttttttctcactttgccttgtgttttccactccgaaagaatgttgtggctgctcttttttctggtgactgccattcatgctgaactctgtcaaccaggtgcagaaaatgcttttaaagtgagacttagtatcagaacagctctgggagataaagcatatgcctgggataccaatgaagaatacctcttcaaagcgatggtagctttctccatgagaaaagttcccaacagagaagcaacagaaatttcccatgtcctactttgcaatgtaacccagagggtatcattctggtttgtggttacagacccttcaaaaaatcacacccttcctgctgttgaggtgcaatcagccataagaatgaacaagaaccggatcaacaatgccttctttctaaatgaccaaactctggaatttttaaaaatcccttccacacttgcaccacccatggacccatctgtgcccatctggattattatatttggtgtgatattttgcatcatcatagttgcaattgcactactgattttatcagggatctggcaacgtagaagaaagaacaaagaaccatctgaagtggatgacgctgaagataagtgtgaaaacatgatcacaattgaaaatggcatcccctctgatcccctggacatgaagggagggcatattaatgatgccttcatgacagaggatgagaggctcacccctctctgaagggctgttgttctgcttcctcaagaaattaaacatttgtttctgtgtgactgctgagcatcctgaaataccaagagcagatcatatattttgtttcaccattcttcttttgtaataaattttgaatgtgcttgaaagtgaaaagcaatcaattatacccaccaacaccactgaaatcataagctattcacgactcaaaatattctaaaatatttttctgacagtatagtgtataaatgtggtcatgtggtatttgtagttattgatttaagcatttttagaaataagatcaggcatatgtatatattttcacacttcaaagacctaaggaaaaataaattttccagtggagaatacatataatatggtgtagaaatcattgaaaatggatcctttttgacgatcacttatatcactctgtatatgactaagtaaacaaaagtgagaagtaattattgtaaatggatggataaaaatggaattactcatatacagggtggaattttatcctgttatcacaccaacagttgattatatattttctgaatatcagcccctaataggacaattctatttgttgaccatttctacaatttgtaaaagtccaatctgtgctaacttaataaagtaataatcatctctttttgattgtgaaaaaaaaaaaaaaaaaaaaaaaaaaaaaaaaaaaaaaaaaa

SEQ ID NO: 96 - DNA, 1492 bp, Homo sapiens
gccttcccacactccattccctgtcaagttatggctgtcccctcaccccagctgctcctagagaggcccttkttacctgtgtcattcatgtttctaacaagccaccctccaccccgtcttgtgtgccccatgcacctgtgcatctgtgctgtgtgggtgttggtggcccttttgcgcatgcatggggcatcccctgcccagaccagcgggacaaggagcgggaacggcggctgcaggaggcacggggccggccaggggaggggcgcggcaacacagccactgagaccaccacgaggcacagccagcgggcagctgatggctctgctgtcagcactgttaccaagactgagcggctcgtccactccaatgatggcacacggacggcccgcaccaccacagtggagtcgagtttcgtgaggcgctcggagaatggcagtggcagcaccatgatgcaaaccaagaccttctcctcttcctcctcatccaagaagatgggcagcatcttcgaccgcgargaccaggccagcccacgggccggcagcctggcggcgctcgagaaacggcaggccgagaagaagaaagagctgatgaaggcgcagagtctgcccaagacctcagcctcccaggcgcgcaaggccatgattgaraagctggagaaggagggcgcggccggcagccctggcggaccccgcgcagccgtgcagcgatccaccagcttcggggtccccaacgccaacagcatcaagcagatgctgctggactggtgtcgagccaagactcgcggctacgagcacgtcgacatccagaacttctcctccagctggagtgatgggatggccttctgtgccctggtgcacaacttcttccctgaggccttcgactatgggcagcttagccctcagaaccgacgccagaacttcgaggtggccttctcatctgcggagacccatgcggactgcccgcagctcctggatacagaggacatggtgcggcttcgagagcctgactggaagtgcgtgtacacgtacatccaggaattctaccgctgtctggtccagaaggggctggtaaaaaccaaaaagtcctaamccctgctcggggccccacggatgctggtggactgtgtgcccctggtggaggtggacgacatgatgatcatgggcaagaagcctgaccccaagtgtgtcttcacctatgtgcagtcgctctacaaccacctgcgacgccacgaactgcgcctgcgcggcaagaatgtctagcctgcccgcccgcatggccagccagtggcaagctgccgcccccactctccgggcaccgtctcctgcctgtgcgtccgcccaccgctgccctgtctgttgcgacaccctcccccccacatacacacgcagcgttttgataaattattggttttcaamraaaaaaaaaaaaaaaaaaaaaaaaaaaaaaaaaaaaaaaaaaaaaaaaaaaaaaaaaaaaaaaaaaaaaaaaaaag

SEQ ID NO: 97 - DNA, 1215 bp, Homo sapiens
ggcacgagcttttcagtactctcacttattcatgacacaggaatgaccctttactcaaaactcttgtggttgttcaaaggtgagcttctttttcccttagtcttagcctatgtgttgctgttgtatattgttaccaagttcaactacctaattttgaagctctttccaaataagatacaaattaaaaggggaagcattgccagtaacaggtccctagagagcagtgccagcctgcctgcaagaaaagaggagaaacttcttaaaaagttttaagcctgggcaacataaggagattgtttctatgaaaaataaaaattagccaggatggtggtgtacacctgtagtcccagctactcgggaagatgagattggaggatcacttgggcctgggaggttgaggctacagtgaactgtgattgtgccactgtactccagtctgggcgacagtgaaatcttgtctaaacaaaaacaatttaactgggaagcacagtggtccttgaggacatttaatatcaggacaaagagcctatgaatatatcactgatgtatataaaccctaaggcgttaataaaagctaactgtttagtgttatccatttaagggaacaggaggaattgcataacttttagattagtcatagtggtgcctaagggatatgctgtggtatatttgtatagccagggcacttagccttccaaccaatttatataccatgttcttcaactgtgggtgagatttagcctcaagatttgatttactatatgtaagtacattacttgatttctataaagaatctttagtggaagatgttattctgaattatttatcaatatgattaatccagttagaaattattaatgatcttcctttatactatacataggataacttttaacttgtcgctacagttgttgctctgaggatcttaattttgttactttctaggctacatgaagctatctttttaaaaagtgtactcttcattttcactgttattgtgtacttagcataaaaaactcaaatctaggccaggtgcagtggctcatgcctgtaatcccagcactttgggaggctgaagcatgcggatcacttgagcccaggagttcaagaccagcctgggcaacatggctaatgaacactaagcatagttttgatgtctttcatattaaagactttctcaaattcttaaaaaaaaaaaaaaaaaaaaaaaaaaaa

SEQ ID NO: 98 - DNA, 1543 bp, Homo sapiens
ggcacgagatttgattctcatgctcctttcaaaagagcatactagtttggggtggttggttattttcttaaccttagcaagccagcttatttcctatggaagcagaactggaaacagcagatgtccaccatgcttatacaggacactacacactgtctcgacaagccatgttctttcctccctcttcgtgagcactttctctggtgatgagttagtatggactacttgaacctcaaaactgggcctctcacccaaagccaaatgaagtagcgtatgccaggatgatgtttcttttgggccgttggcagtgagactgctaagcaggctgccttaggttttgctgtggcaatgctagcagattgttccctctttcaaaggggcaaaaatatcattttggtatgataactgactttctatttacagtttctggcccccaaagacaaaccaagtggagacacagcagctgtatttgaagaaggtggtgatgtggacgatttagtaagtacttttaatatgcacctggtgttctgtgattgaagtcacctgagctgtaaatacagccacaaaggctgattatcttacacttgttgcttatttgtgttttaatttccaatacaccagaagcttcctacaccattatatattgccattataaattcaatcagataggtaatttcataatagaaattcctgtgtttcatggtgtcggctatattgttcattcagattaatcctctcccttgaagggctgaaaaagactagggagctattccattagtagcaaaatgttgtaattcactgaaattgctgttaaccaaaaataagtaatacaacatggcattttgtgtgggttgacaaatgaaacaggccttaaaagggctacttcttaaatgttctcaattaacttaatgtaaacaaaatagaccgataggcatttgaggatttctggaccccattacaccatgttgttgatgtctgggaagctgtgtagtaaatgtcttttgtatctatccttaatgtttggaaacttcccgcctttaagcttcatatgacaactgaccaacaaacactacgtactatgatgtcaatcttttttagagacattctcattactaaaatgagtggatacttgaatgtttaactcctaaaataatgagcggtgaataaatgagcaagtacatgcatgccttccaatgtagagtcattttcattaaaccctctctcaccagagaagcagtggtatgaaattggcctgattcctttctaagtgtgttgttcttgttcacagttggacatgatataggtcgtggatgtatggggaatctaagagagctgccatcgctgtgatgctgggagttctaacaaaacaagttggatgcggccattcaaggggagccaaaatctcaagaaattcccagcaggttacctggaggcggatcatctaattctctgtggaatgaatacacacatatatattacaagggataatttagaccccatacaagtttataaagagtcattgttaaaaaaaaaaaaaaaaaaa

SEQ ID NO: 99 - DNA, 1262 bp, Homo sapiens
cctaatggcccgasctgaatacttgaaggagctcaagatgagggaatctcgctgggaagctgacaccctggacaaagagggactgtcggaatctgttcgtagctcttgcacccttcagtgaccctagaagaatgattggacagatgtgagccatctggagcagaggggcactaacccaggctgacgccaagaatgaagtggcccactgcagccctggcgagcaggcttcttggatggacagtgctgagacccccatatcccagagtccccagcctccctcaggttactctgcaccccacagatggtttgatggctgtgctgtatactggaggggagggcaggactctgggagaacagcacttctttcatgagacctttgttactcggtggttactgggtcctgtgcctgtccgttttggggcatgcagccctctatcatttttggctccgagaagagggcaaggggcccccgcaggtarcttctgtgcttgccctcgccctgccagcaggcagctgtgcccctggcctgcccttcccgggaccccttattccaactcagctcctctttgcactggaatggggcactccaacacccctcagggaccaccctccccacagtatgcactcagccccacagaacccaccagtctttctgggaactcacacctgcccgccatcttggtactttaggttaatccctcaagcatgaaagctggatcttttggggtttaagaagcccaagccttgttcctgccctggcctagggagcactcaggagggttccttggtcctcatctctcccacctccgttccctctgggccccacactagccacagcgcgggccttgtgctggagtttgagcctgggacagggagagggaggcttggagacagtctgacccagtgccctctaggccacccacttctaggcctgccctgccgccgtggagccctgggcaagctctttcccctttctgggcctgggtctccccatctcttcaatggggctgataccttcacagcccacagcatgggcacttatgaggacaaagtgaatttaacctggaaaagaatgtatttgagagtttcttttaaataatcagcgggtgttggtgatttgtagcccttctgcccttaaatgcttccttgggcaagagctgtctgtcctccctgcaggaggctgagtgtgaagagtatcattcattgtttctctattaaattattttctgctaaaaaaaaaaaaaaaaaatttctgcggtccg

SEQ ID NO: 100 - DNA, 989 bp, Homo sapiens
  misc_feature (955)..(955): n equals a,t,g, or c
  misc_feature (979)..(979): n equals a,t,g, or c
acgcgtccgctctggatccctcgttccctggtgctggtggaaatgaccatcacctcgttttatgccgtgtgcttttacctgctgatgctggtcatggtggaaggctttggggggaaggaggcagtgctgaggacgctgagggacaccccgatgatggtccacacaggcccctgctgctgctgctgcccctgctgtccacggctgctgctcaccaggaagaagcttcagctgctgatgttgggccctttccaatacgccttcttgaagataacgctgaccctggtgggcctgtttctcatccccgacggcatctatgacccagcagacatttctgaggggagcacagctctatggatcaacactttcctcggcgtgtccacactgctggctctctggaccctgggcatcatttcccgtcaagccaggctacacctgggtgagcagaacatgggagccaaatttgctctgttccaggttctcctcatcctgactgccctacagccctccatcttctcagtcttggccaacggtgggcagattgcttgttcgcctccctattcctctaaaaccaggtctcaagtgatgaattgccacctcctcatactggagacttttctaatgactgtgctgacacgaatgtactaccgaaggaaagaccacaaggttgggtatgaaactttctcttctccagacctggacttgaactcaaagcctaaggtggatggcttggacaatgaaaggatgctgtactcattagaatacaagattcctttactgtccctcaaccttgaccaaatgggaagcattcccccttgtcaacacaagctggcagatacatttgactctacagatgaaggtgaacaatgttaggataaaattgctttggatcttgcctggaagttgttttaagttttgtaataaacaagatgatgtctgaaaaaaaaaaaaaaaaaanaaaaaaaaaaaaaaaaaaaaaaanaaaaaaaaaa

SEQ ID NO: 101 - DNA, 1191 bp, Homo sapiens
ccacgcgtccgcacgtcagggggcagtcattgctacggggaatactaaatgatggcatgagaagagaaaggggtgctgtccaacaagaggttttggaaggaggcttctggaagtgtgagctgggagcaggggtttggggaggcatctcccaggagctatgtggttgtctcccgtgccaggagtttgtgctgctgtactagcattgagcttctggattgcaaagttcccaggagagggaacagccattgcaaaggctctggggcgcctgaagtaatccaggaacagctgggtacctggtgaggggaaggtggagtggtgagggccaggaggtgatgcagggaggtgccacagggagcctgctgggccctgtgggctgaggcggggctttggcttttgcactgagagaagtgggagaggacttgactcgggttcccatgctccccctggtggccatgtggtgaacagatggtggcaggtgagtgagaactccagtccaggacagtggtgaccatgcagggatcaggaggcaggcggtggttggatttggagggcttctgaagatagagttgctggcagctcctgccttgcagatggggcagggttgttgacacctggctgttgggtctggggaaacacagccatcgttgcccagcagctctagtgaccccagacattgacatgggccctgtctgggagcgaatgtctgtgaagggcttccttcatctgggacacacctctcagcctgtttggctacggtgtcctccctctgtgtctgtctgtctcctgtgactggctgactgggcccaccgtgcccccgcctccccacagcggaacggggccgactacgctgtttacatcaacacagcccaggagtttgatggctctgactcaggtgcccgaccagacgaggctgtctcctggggcaagatccgggtggatgcacagcccgtcaaggtctatgctgacgcctccctggtcttccccctgcttgtggctgaaacctttgcccagaagatggatgccttcatgcatgagaagaacgaggactgagcggctgcggtcccaggaaggtcttaccccctcttctatttattaatttgcagacccagcccctcccctactttttggtcagctacgtctctagaataagatggtatctgaagtcctaaaaaaaaaaaaaaaaaaaaaaaa

SEQ ID NO: 102 - DNA, 913 bp, Homo sapiens
ggcacgagtgaatatttttaaggctcttgatttgctggaggactgaaaaaaatgaagtgatagtgtctgagaatattcatttgacttattttttacagcatccattccctttcatgttgggagtgttctctttagtggcttaaattctttgcctgcctttgggagtgtggagggtggagtggaccttttgagggtcgagggtgaatgtggccttgctgtttggatagccttttgtttggattctggctctgggcacagggaataacactactttctgaggacagtatcaggattgtctgtagttcctgtgagcctgaggtgctgcatgtgcccacccccgtgtacaggccctgccccagccacagcccactcaccttttgaccctcctgctctgcctatacagtttgaataccagcaggctcagctggaggctgagatcgaaaacctctcatggaaagtggagcgtgcagacagctatgacagaggggacttggagaaccagatgcatatagcggagcagcggaggagaaccctgctgaaagatttccatgacacctaagttgggatgtggatgtgccggggtgaggaagatgtggctgcaaggtctcccggctgccatactgcatgctgcaggctctgcctttcatgaccccaggcaacagccagggccccactcctgagagacactggcaacacctcttagttgatttctgttttcttctcttttcactttttgtttctaccagggtagaggccatgttgaactggcctcttttcaggacttttatttccccctggatggttgttgggagggagggaaagtgttttctgaatggctattaatagtattagatcattacaacttatgtaactttcaaaggttgtacaattatacaaaaaaaaaaaaaaaaaa

SEQ ID NO: 103 - DNA, 3740 bp, Homo sapiens
  misc_feature (957)..(957): n equals a,t,g, or c
actctctaaggcttttttggactcaccaaacaggcttcttgcagtggagatgaatacagatcacttaaggttgactgtgccaaatggcataggggccctgaagctaagggaaatggaacactacttctcacagggcctgtcagttcagctgtttaatgatgggtccaagggcaaactcaatcatttatgtggagctgactttgtgaaaagtcatcagaaacctccacagggaatggaaattaagtccaatgaaagatgctgttcttttgatggagatgcagacagaattgtttattactaccatgatgcagatggccactttcatctcatagatggagacaagatagcaacgttaattagcagtttccttaaagagctcctggtggagattggagaaagtttgaatattggtgttgtacaaactgcatatgcaaatggaagttcaacacggtatcttgaagaagttatgaaggtacctgtctattgcactaagactggtgtaaaacatttgcaccacaaggctcaagagtttgacattggagtttattttgaagcaaatgggcatggcactgcactgtttagtacagctgttgaaatgaagataaaacaatcagcagaacaactggaagataagaaaagaaaagctgctaagatgcttgaaaacattattgacttgtttaaccaggcagctggtgatgctatttctgacatgctggtgattgaagcaatcttggctctgaagggcttgactgtacaacagtgggatgctctctatacagatcttccaaacagacaacttaaagttcaggttgcagacaggagagttattagcactaccratgctgaaagacaagcagttacacccccaggattacaggaggcaatcaatgacctggtgaagaagtacaagctttctcgagcttttgtccggccctctggtacagaagatgtcgtccngagtatatgcagaagcagactcacaagaaagtgcagatcaccttgcacatgaagtgagcttggcagtatttcagctggctggaggaattggagaaaggccccaaccaggtttctgaagataattttcatattcctgagaaactggactttttacaagtctttacaaaactgtcaataataatggcagtactaagagatttataatcataatgtttacaatgcagcctactggattgtctctagatctgtttttcttaaacactaacagaataattctttataaataggtaagccttacacttgttaaagaaatttacctctaatttcagtctcactaatgtaaaatactgggacttaagtatacaattcagtcactaactgtacagttttatgtggggaacaattcatgcaggctactggaaaattaaatcttattaccaactccttgtgatatctttgccatcaccatcacatgagcaagatgatgttttgcagcattccccattgctgatacaaatggagagggcagagaagactttatacaaccagtttttccattgcagagtcttaagaaagattattagatgacttacctatatgactaatgccatcaggaactcagaggtatgaatagggggttgtccatccctcttccatactgaggtggagatgctcatgcaatacttttaaggatgcatggtccagccttcagttattcttcactgctcttggtgaaggtatgtgggagaaaaactaattataatacgtttcccagcctctgatggagaaggaacaccattctgataccagaacatggttaataaggaaaagagaaaaatccccaaccaatcttaattgaaccaagtctgaaaccaatggaaaaaaaaaatgggtagtgtatattttgcaggtttaagacaactcaggacaataaaaacaatggactttacatgtgtatatatatagctctcttaggcaccataatcagtatgagccaacaatatttaaacttgattcaggccacattcagacatttgctcttatatacaaatatttaaattaaatacaatctgaaatgtgttctgttacatacaaaaaaggaaaaactatacaacgcagagcagtgtgtgtgttttaaataattacatttacatgtaagctaaatggaaccagcaatggtgctcaagtttttatcatcccttccagaaaatctttttctaccatctcttctattttttgcctggctttgctggaacatggtttgtggttctccagtttcatgtccttattagggaaggcatttgagtagaggataggactccctgagtgtcctccacatcggcttgtgactttgctgttgaagacttgactgagcacattgaagaacggcaggagctgctccatactgcgcacggtgcagatggtgagcagcaagtgccctggctcccaacccaatgttctccctgagttgtcttcctctggatttttctgcagaaaacaaaaagtgaactggtattaatacaacagacaatgtggtatgttagaaaaattaaaaatatataaactttggcaattggtcaagaaatgaatacaaatgacattaagtttctaactcctgacctgatcaaaacccttggtgcttctgagaccttttactgccatttattagttttacatggagcagtctaacattgtagtaatagttcccaactagaatgcgcagataagcttagttaacagaaatagctttgaacaggaatagagtcaaacataaaagttttatgttgtgctttgtatttactcaaaaagctcccaggtttctgaaccctcactactgtaaccaaggactaggtcacaaaattactacagaaaaaaggaacaaagtgctttatacatttcataatatatccccttttattataattagttaattcccttttatctaaatggcctaaatttgccatgatggtagcagtgtccaaagtgaataattactgtcagtactgcatcacagagaaaggaagggatccctcaggagacactgctgtctccttctgggttgtgctaaacaacatagggaggaaagctggacctggagtcaaaggaattgagttagtgtgctggctctgccatacttacggcacccttgggcaggatatacaaaggttcctcacttataaaatgggacagtctaaaactaccttttagtagagaagtcaaatgagaaggtatgtgaaaactctgtcaactaaatataaagactaataatttgggtattaagaggctagtttgagaagccacctgaattacacaaacacagctacagacatcattctgtctagagaaagataagagagaacaggttggttgaacttgggcagaatcacagatacaattccacactaaagaatgaaaataagcaatgaactagacagaaggaagaaatcatgaagacttaggaagcagaattacaatctgtcatattaacaaatggagtttgccttctaagatcagatgttgctcagaaactttcattgtttacctaataatttaatatcactagtttcctagtgggtcaagcagatgcaaaatccagcttattttcttctatgtgctctcaagcttattgcttattttaaagtaaaatcctgaaaaaggaaaatattaggttggtgcaaacgtaattgcggtttttgcattgttgaaatttgccgttttatattggagtacattcttaaataaatgtggttatgttatacaaaaaaaaaaaaaaaaaactcgag

SEQ ID NO: 104 - DNA, 1618 bp, Homo sapiens
ccacgcgtccgcaaggagccagaggccatgcagtggctcagggtccgtgagtcgcctggggaggccacaggacacagggtcaccatggggacagccgccctgggtcccgtctgggcagcgctcctgctctttctcctgatgtgtgagatccctatggtggagctcacctttgacagagctgtggccagcgactgccaacggtgctgtgactctgaggaccccctggatcctgcccatgtatcctcagcctcttcctccggccgcccccacgccctgcctgagatcagaccctacattaatatcaccatcctgaagggtgacaaaggggacccaggcccaatgggcctgccagggtacatgggcagggagggtccccaaggggagcctggccctcagggcagcaagggtgacaagggggagatgggcagccccggcgccccgtgccagaagcgcttcttcgccttctcagtgggccgcaagacggccctgcacagcggcgaggacttccagacgctgctcttcgaaagggtctttgtgaaccttgatgggtgctttgacatggcgaccggccagtttgctgctcccctgcgtggcatctacttcttcagcctcaatgtgcacagctggaattacaaggagacgtacgtgcacattatgcataaccagaaagaggctgtcatcctgtacgcgcagcccagcgagcgcagcatcatgcagagccagagtgtgatgctggacctggcctacggggaccgcgtctgggtgcggctcttcaagcgccagcgcgagaacgccatctacagcaacgacttcgacacctacatcaccttcagcggccacctcatcaaggccgaggacgactgagggcctctgggccaccctcccggctggagagctcagctgatacggcatcctgcgagaagacctgccctcctcactgggatccccttcctgcctcctcccagggctctgccagggccttgctcagtcccttccaccaaagtcatctgaacttccgtttcccagggcctccagctgccctcagacactgatgtctgtccccaggtgctctctgcccctcatgcccctctcaccggcccagtgccccgactctccaggctttatcaaggtgctaaggcccgggtgggcagctcctcgtctcagagccctcctccggcctggtgctgcctttacaaacacctgcaggagaagggccacggaagccccaggctttagagccctcagcaggtctggggagctagagcaaaggagggacctcaggccttccgtttcttcttccagggtggggtggcctggtgttcccctagccttccaaacccaggtggcctgcccttctccccagagggaggcggcctccgcccattggtgctcatgcagactctggggctgaggtgccccggggggtgatctctggtgctcacagtcgagggagccgtggctccatggccagatgacggaaacagggtctgaccaagtgccaggaagacctgtgctataaaccaccctgcctgatcctgcccctgcctgaccccgccacgccctgccgtccagcatgattaaagaatgctgtctcctcttggaaaaaaaaaaaaaaaaa

SEQ ID NO: 105 - DNA, 1892 bp, Homo sapiens
ccacgcgtccgcgggaccggacggatcttctccggccatgaggaagccagccgctggcttccttccctcactcctgaaggtgctgctcctgcctctggcacctgccgcagcccaggattcgactcaggcctccactccaggcagccctctctctcctaccgaatacgaacgcttcttcgcactgctgactccaacctggaaggcagagactacctgccgtctccgtgcaacccacggctgccggaatcccacactcgtccagctggaccaatatgaaaaccacggcttagtgcccgatggtgctgtctgctccaacctcccttatgcctcctggtttgagtctttctgccagttcactcactaccgttgctccaaccacgtctactatgccaagagagtcctgtgttcccagccagtctctattctctcacctaacactctcaaggagatagaagcttcagctgaagtctcacccaccacgatgacctcccccatctcaccccacttcacagtgacagaacgccagaccttccagccctggcctgagaggctcagcaacaacgtggaagagctcctacaatcctccttgtccctgggaagccaggagcaagcgccagagcacaagcaggagcaaggagtggagcacaggcaggagccgacacaagaacacaagcaggaagaggggcagaaacaggaagagcaagaagaggaacaggaagaggagggaaagcaggaagaaggacaggggactaaggagggacgggaggctgtgtctcagctgcagacagactcagagcccaagtttcactctgaatctctatcttctaacccttcctcttttgctccccgggtacgagaagtagagtctactcctatgataatggagaacatccaggagctcattcgatcagcccaggaaatagatgaaatgaatgaaatatatgatgagaactcctactggagaaaccaaaaccctggcagcctcctgcagctgccccacacagagccttgctggtgctgtgctattcgatcgtggagaatacctgcatcataacccccacagccaaggcctggaagtacatggaggaggagatccttggtttcgggaagtcggtctgtgacagccttgggcggcgacacatgtctacctgtgccctctgtgacttctgctccttgaagctggagcagtgccactcagaggccagcctgcagcggcaacaatgcgacacctcccacaagactccctttgcagccccttgcttgcctcccagagcctgtccatcggcaaccaggtagggtccccagaatcaggccgcttttacgggctggatttgtacggtgggctccacatggacttctggtgtgcccggcttgccacgaaaggctgtgaagatgtccgagtctctgggtggctccagactgagttccttagcttccaggatggggattccctaccaagatttgtgacacagactatatccagtacccaaactactgttccttcaaaagccagcagtgtctgatgagaaaccgcaatcggaaggtgtcccgcatgagatgtctgcagaatgagacttacagtgcgctgagccctggcaaaagtgaggacgttgtgcttcgatggagccaggagttcagcaccttgactctaggccagttcggatgagctggcgtctattctgcccacaccccagcccaacctgcccacgttctctattgttttgagaccccattgctttcaggctgccccttctgggtctgttactcggcccctactcacatttccttgggttggagcaacagtcccagagagggccatggtgggagtgcgccctccttaaaagatgactttacataaaatgttgatcttcaaaaaaaaaaaaaaaaaaaaa

SEQ ID NO: 106 - DNA, 646 bp, Homo sapiens
tcgacccacgcgtccgataactttttcaagcaatatcagtgagtgggtcccatcgacagggttccaggacctggaacactttaacagaaggaaatgccgaagcagcttgcacagttgctttacagacttccaagaggctgattctggcttcaagatggagccttggagttggttttttttttttttttttttcttccctcaaagaacctgcggttgcgctttgtgtgttttgtttttgttttccatttgggggccccatgggaaagagcttctgaactctttcctttatgaactcccactgtgttcctataaaggcccttttctttcttagtgttgtaagttacattttcattatgccccatcacatcttctttactgtaaaaatattaaaaagctgtttccaagtgggacagctaatgaagctctaattattgcagacatatttttgagatgtaaaaaaaaaaatttaaagttaaatgataagtcttagaggcgagtgaggaataaaatggatgtaaacatttacatgggatgcattagaattctgctgtgtgtactgtcttttggttgaaacaaattatgaacagtgactaataataaaaagtcaatacccaawraaaaaaaaaaaaaaaaaaaaagggcggcc

SEQ ID NO: 107 - DNA, 826 bp, Homo sapiens
  misc_feature (726)..(726): n equals a,t,g, or c
ggtcgacccacgcgtccggctccctttgttttggtggcagccttcttgtgctgtatacttgttccctagggtgtataataatatgtgcactagagtgctaggtaccctaccacattgctgggaccttgccacactgctgcagccttccagtaggatatgggggaatgtcagtgaggctccagggatgtagatatgtagggaatgttggaccccagggcaacatgcaatctggtaggagttgggctctcaaaatggtgctgctgtgtaacagctgcttgggtcttggggtagggagtgtaggacccagcatgagctccctctttggagcagtgctgtctgagactccaggcagctccgtgtattagtctcaggacctgcaaaggcctaggggctctttttgggtaggactgcaggagtctccatggtgggaatgtgaaccactggaaatctctcatttaccatttccctgtactggagatgctttctgggctcccagatgatactarctgggctggttgcctcamttccttctccctctgtgcataaggcattttctgtcacttctctgctgaactctagtgttctttcttagaggctgtactcaaagtttcattatccattcagtatttttattcttctttgtggaggtggcaagtgctaggtgcctctagtcaatcatcttgaagccccctgttatgttaaagtctttaatggaaaaagaagacnacatgcatgaccaggcagatactttgagcagagtcataggaactgctaaaaaaaaaaaaaaaaaaaaaaaaaaaaaaaaaaaaaaaaaaaaagggcggcc

SEQ ID NO: 108 - DNA, 1237 bp, Homo sapiens
  misc_feature (942)..(942): n equals a,t,g, or c
  misc_feature (949)..(1184): n equals a,t,g, or c
  misc_feature (1187)..(1187): n equals a,t,g, or c
  misc_feature (1194)..(1194): n equals a,t,g, or c
  misc_feature (1196)..(1196): n equals a,t,g, or c
  misc_feature (1218)..(1218): n equals a,t,g, or c
gcaacctgggcttttatacagaagaatacgaatcacaggtgtgtgagcatctacttaattaatttgcttacagccgatttcctgcttactctggcattaccagtgaaaattgttgttgacttgggtgtggcaccttggaagctgaagatattccactgccaagtaacagcctgcctcatctatatcaatatgtatttatcaattatcttcttagcatttgtcagcattgaccgctgtcttcagctgacacacagctgcaagatctaccgaatacaagaacccggatttgccaaaatgatatcaaccgttgtgtggctaatggtccttcttataatggtgccaaatatgatgattcccatcaaagacatcaaggaaaagtcaaatgtgggttgtatggagtttaaaaaggaatttggaagaaattggcatttgctgacaaatttcatatgtgtagcaatatttttaaatttctcagccatcattttaatatccaattgccttgtaattcgacagctctacagaaacaaagataatgaaaattacccaaatgtgaaaaaggctctcatcaacatacttttagtgaccacgggctacatcatatgctttgttccttaccacattgtccgaatcccgtataccctcagccagacagaagtcataactgattgctcaaccaggatttcactcttcaaagccaaagaggctacactgctcctggctgtgtcgaacctgtgctttgatcctatcctgtactatcacctctcaaaagcattccgctcaaaggtcactgagacttttgcctcacctaaagagaccaaggctcagaaagaaaaattaagatgtgaaaataatgcataaaagacaggattttttgtgctaccaattctgggctttattggaccataaagtctattatagcttggaaggttaaaaaaaaaaaanaaaaagnnnnnnnnnnnnnnnnnnnnnnnnnnnnnnnnnnnnnnnnnnnnnnnnnnnnnnnnnnnnnnnnnnnnnnnnnnnnnnnnnnnnnnnnnnnnnnnnnnnnnnnnnnnnnnnnnnnnnnnnnnnnnnnnnnnnnnnnnnnnnnnnnnnnnnnnnnnnnnnnnnnnnnnnnnnnnnnnnnnnnnnnnnnnnnnnnnnnnnnnnnnnnnnnnnnnnnnnnnnnnnnnnnnnnnnnnnnnccnaatgggncncgcccctggtttccgggccccntttaatccccgggcggggt

SEQ ID NO: 109 - DNA, 1267 bp, Homo sapiens
ggcacgagctgcaggggcggggcggcgccaagcgcagggagcccggctgagtggcagcccagattgaagatggatacgtgacaatcccagggaccgctgcactgacttcatttccttagacaagacacagtgtagggcccggcccgtgttggccccaggactcctttggaatatagctgtggacaatgaatcctgcgagcgatgggggcacatcagagagcatttttgacctggactatgcatcctgggggatccgctccacgctgatggtcgctggctttgtcttctacttgggcgtctttgtggtctgccaccagctgtcctcttccctgaatgccacttaccgttctttggtggccagagagaaggtcttctgggacctggcggccacgcgtgcagtctttggtgttcagagcacagccgcagctgtgggctctgctgggggaccctgtgctgcatgccgacaaggcgcgtggccagcagaactggtgctggtttcacatcacgacagcaacgggattcttttgctttgaaaatgttgcagtccacctgtccaacttgatcttccggacatttgacttgtttctggttatccaccatctctttgcctttcttgggtttcttggctgcttggtcaatctccaagctggccactatctagctatgaccacgttgctcctggagatgagcacgccctttacctgcgtttcctggatgctcttaaaggcgggctggtccgagtctctgttttggaagctcaaccagtggctgatgattcacatgtttcactgccgcatggttctaacctaccacatgtggtgggtgtgtttctggcactgggacggcctggtcagcagcctgtatctgcctcatttgacactgttccttgtcggactggctctgcttacgctaatcattaatccatattggacccataagaagactcagcagcttctcaatccggtggactggaacttcgcacagccagaagccaagagcaggccagaaggcaacgggcagctgctgcggaagaagaggccatagctgctccagccggggctccggggcggcagcagagctggcacaccgattctgggaagccccgcgaatgatggcttttgaattaatgaggcagtgaatgttttgtgtttacttctaagggaaatactaactttctttcgcattagtattaattttgaagtagctacaaagtatttttaagaaattataattttatgactgtcaaaaaaaaaaaaaaaaaaaaaaa

SEQ ID NO: 110 - DNA, 3194 bp, Homo sapiens
cacctcttcccctcccccgcttccctgtcgcgctccgctggctggacgcgctggaggagtggagcagcacccggccggccctgggggctgacagtcggcaaagtttggcccgaagaggaagtggtctcaaaccccggcaggtggcgaccaggccagaccaggggcgctcgctgcctgcgggcgggctgtaggcgagggcgcgccccagtgccgagacccggggcttcaggagccggccccgggagagaagagtgcggcggcggacggagaaaacaactccaaagttggcgaaaggcaccgcccctactcccgggctgccgccgcctccccgcccccagccctggcatccagagtacgggtcgagcccgggccatggagcccccctggggaggcggcaccagggagcctgggcgcccggggctccgccgcgaccccatcgggtagaccacagaagctccgggacccttccggcacctctggacagcccaggatgctgttggccaccctcctcctcctcctccttggaggcgctctggcccatccagaccggattatttttccaaatcatgcttgtgaggaccccccagcagtgctcttagaagtgcagggcaccttacagaggcccctggtccgggacagccgcacctcccctgccaactgcacctggctcatcctgggcagcaaggaacagactgtcaccatcaggttccagaagctacacctggcctgtggctcagagcgcttaaccctacgctcccctctccagccactgatctccctgtgtgaggcacctcccagccctctgcagctgcccgggggcaacgtcaccatcacttacagctatgctggggccagagcacccatgggccagggcttcctgctctcctacagccaagattggctgatgtgcctgcaggaagagtttcagtgcctgaaccaccgctgtgtatctgctgtccagcgctgtgatggggttgatgcctgtggcgatggctctgatgaagcaggttgcagctcagaccccttccctggcctgaccccaagacccgtcccctccctgccttgcaatgtcaccttggaggacttctatggggtcttctcctctcctggatatacacacctagcctcagtctcccacccccagtcctgccattggctgctggacccccatgatggccggcggctggccgtgcgcttcacagccctggacttgggctttggagatgcagtgcatgtgtatgacggccctgggccccctgagagctcccgactactgcgtagtctcacccacttcagcaatggcaaggctgtcactgtggagacactgtctggccaggctgttgtgtcctaccacacagttgcttggagcaatggtcgtggcttcaatgccacctaccatgtgcggggctattgcttgccttgggacagaccctgtggcttaggctctggcctgggagctggcgaaggcctaggtgagcgctgctacagtgaggcacagcgctgtgacggctcatgggactgtgctgacggcacagatgaggaggactgcccaggctgcccacctggacacttcccctgtggggctgctggcacctctggtgccacagcctgctacctgcctgctgaccgctgcaactaccagactttctgtgctgatggagcagatgagagacgctgtcggcattgccagcctggcaatttccgatgccgggacgagaagtgcgtgtatgagacgtgggtgtgcgatgggcagccagactgtgcggacggcagtgatgagtgggactgctcctatgttctgccccgcaaggtcattacagctgcagtcattggcagcctagtgtgcggcctgctcctggtcatcgccctgggctgcacctgcaagctctatgccattcgcacccaggagtacagcatctttgcccccctctcccggatggaggctgagattgtgcagcagcaggcacccccttcctacgggcagctcattgcccagggtgccatcccacctgtagaagactttcctacagagaatcctaatgataactcagtgctgggcaacctgcgttctctgctacagatcttacgccaggatatgactccaggaggtggcccaggtgcccgccgtcgtcagcggggccgcttgatgcgacgcctggtacgccgtctccgccgctggggcttgctccctcgaaccaacaccccggctcgggcctctgaggccagatcccaggtcacaccttctgctgctccccttgaggccctagatggtggcacaggtccagcccgtgagggcggggcagtgggtgggcaagatggggagcaggcacccccactgcccatcaaggctcccctcccatctgctagcacgtctccagcccccactactgtccctgaagccccagggccactgccctcactgcccctagagccatcactattgtctggagtggtgcaggccctgcgaggccgcctgttgcccagcctggggcccccaggaccaacccggagcccccctggaccccacacagcagtcctggccctggaagatgaggacgatgtgctactggtgccactggctgagccgggggtgtgggtagctgaggcagaggatgagccactgcttacctgaggggacctgggggctctactgaggcctctcccctgggggctctactcatagtggcacaaccttttagaggtgggtcagcctcccctccaccacttccttccctgtccctggatttcagggacttggtgggcctcccgttgaccctatgtagctgctataaagttaagtgtccctcaggcagggagagggctcacagagtctcctctgtacgtggccatggccagacaccccagtcccttcaccaccacctgctccccacgccaccaccatttgggtggctgtttttaaaaagtaaagttcttagaggatcataggtctggacactccatccttgccaaacctctacccaaaagtggccttaagcaccggaatgccaattaactagagaccctccagcccccaaggggaggatttgggcagaacctgaggttttgccatccacaatccctcctacagggcctggctcacaaaaagagtgcaacaaatgcttctattccatagctacggcattgctcagtaagttgaggtcaaaaataaaggaatcatacatctcacctcgtgc

SEQ ID NO: 111 - DNA, 1420 bp, Homo sapiens
ggcacgagcacaagctcaagaggccgcttgcacgcatgtggacactccatgattctgcttctatctctctttcagggcgtgcgaggcagcctgggctcccctggaaatcgggaaaacaaggagaagaaggtcttcatcagcctggtaggctcccgaggccttggctgcagcatttccagcggccccatccagaagcctggcatctttatcagccatgtgaaacctggctccctgtctgctgaggtgggattggagataggggaccagattgtcgaagtcaatggcgtcgacttctctaacctggatcacaaggagctgcagctggccgggagctgttcatgacagaccgggagcggctggcagaggcgcggcagcgtgagctgcagcggcaggagcttctcatgcagaagcggctggcgatggagtccaacaagatcctccaggagcagcaggagatggagcggcaaaggagaaaagaaattgcccagaaggcagcagaggaaaatgagagataccggaaggagatggaacagattgtagaggaggaagagaagtttaagaagcaatgggaagaagactggggctcaaaggaacagctactcttgcctaaaaccatcactgctgaggtacacccagtaccccttcgcaagccaaagtatgatcagggagtggaacctgagctcgagcccgcagatgacctggatggaggcacggaggagcagggagagcaggatttccggaaatatgaggaaggctttgacccctactctatgttcaccccagagcagatcatggggaaggatgtccggctcctacgcatcaagaaggagggatccttagacctggccctggaaggcggtgtggactcccccattgggaaggtggttgtttctgctgtgtatgagcggggagctgctgagcggcatggtggcattgtgaaaggggacgagatcatggcaatcaacggcaagattgtgacagactacaccctggctgaggctgacgctgccctgcagaaggcctggaatcagggcggggactggatcgaccttgtggttgccgtctgccccccaaaggagtatgacgatgagctgaccttcttctgaagtccaaaaggggaaaccaaattcaccgttaggaaacagtgagctccggccccacctcgtgaacacaaagcctcggaccagccttgagagaggccacactattcctttcctctggcccagtgaatttggtctctcccagctctgggggactccttccttgaaccctaataagaccccactggagtctctctctctccatccctctcctctgccctctgctctaattgctgccaggattgtcactccaaaccttactctgagctcattaataaaataaacagatttattttccagcttaaaaaaaaaaaaaaaaa

SEQ ID NO: 112 - DNA, 921 bp, Homo sapiens
ggaactgctgctcatggaactggctcctctcctcttgccacttgagtctgttcgagaagtccagggaagaacttgaagagcaaaatacactcttgagtttgttgggttttgggagaggtgacagtagagaagggggttgtgtttaaaataaacacagtggcttgagcaggggcagaggttgtgatgctatttctgttgactcctagcagccatcaccagcatgaatgtgttcgtagggcctttgagtgtggcgattgtcatattctgttggataacaatgtattgggtgtcgattgtcatggggcaggggagagggcagtacacctggaggaccattttgtccacatcgacaccatcagtctgctcttagaggatgccctggagtattcggcgttgattgcggggcacccgaaatcagacttgccacctggactgtcgaggtgcagaccctgggagcaccactggcccatctcttacacaggctgaccgatttctcctggtgttcagagtctgtttttgtctagcaccatttgaaatcggttatgatgtagggggaaaagcagcagcctcgaagcctcatgccaactctgggcagcagcagcctgtggtttcctggaagatggatgggcagagaatagggaaggaagatcatgcttttccctactaacttctgtaactgcatgtatgatacattattgcagaggtaagagatagtttaatggatttttaaaaacaaattactataatttatctgatgttctctagttgcattttgctgaaatgtagtgctgttctaaattctgtaaattgattgctgttgaattatctttctgttgagaagagtctattcatgcatcctgaccttaataaatactatgttcagttaaaaaaaaaaaaaaaaaaaaaaaaaagggcggccgc

SEQ ID NO: 113 - DNA, 822 bp, Homo sapiens
ccgggttgacccacgcgtccgcggacgcgtgggcaaatattggtaatgctgggaaaagggagttcagaatgccaaaacgtttctggttttatttgtcttgggtgaggacccagaggggtgggagatggaggtgtgagcagcatggtctgttgtggttttttcttgttgtggagtagagttagatcatacatgaagctctctgggcataggtggagtagcagctgtccacaccattgctattcaaagtgtggtttgcacaccagtaatggaaaatcatctgtgcacactgtttagtttaactgatactttttttttcatagcaagatttcttaatgaaggaagtaatgtattgatttacattctgactcattgtctttatcttgtctttgatcagtttgtagactggcactggtccacactttgaataacactattcttcattctactttccatgtacccggatgccaggcaaacagggagttttacgctgggtggagaacggaacattctgctgactccttgaaagggcttatctcaccaggcatggtagctcacgactgtaatcccagctctttgggaggctgaggtgggaggattgcttgagctcaggagtttgagaccagcctgggtaacatagggataccttgtccctacttaaaaaaaaaaaaaaaaaaattagctgggtgtggttgtgcacacctgtagttccagctattccaraggctgaggcaggaggataggttgagcatgggargttgaggctgcartgtgccttgatggcgccactgcactccatcctggttgacaaaaaaaaaaaaaaaa

SEQ ID NO: 114 - DNA, 1871 bp, Homo sapiens
ggcacgagggagcccgggtcgagaggacgaggtgccgctgcctggagaatcctccgctgccgtcggctcccggagcccagccctttcctaacccaacccaacctagcccagtcccagccgccagcgcctgtccctgtcacggaccccagcgttaccatgcatcctgccgtcttcctatccttacccgacctcagatgctcccttctgctcctggtaacttgggtttttactcctgtaacaactgaaataacaagtcttgatacagagaatatagatgaaattttaaacaatgctgatgttgctttagtaaatttttatgctgactggtgtcgtttcagtcagatgttgcatccaatttttgaggaagcttccgatgtcattaaggaagaatttccaaatgaaaatcaagtagtgtttgccagagttgattgtgatcagcactctgacatagcccagagatacaggataagcaaatacccaaccctcaaattgtttcgtaatgggatgatgatgaagagagaatacaggggtcagcgatcagtgaaagcattggcagattacatcaggcaacaaaaaagtgaccccattcaagaaattcgggacttagcagaaatcaccactcttgatcgcagcaaaagaaatatcattggatattttgagcaaaaggactcggacaactatagagtttttgaacgagtagcgaatattttgcatgatgactgtgcctttctttctgcatttggggatgtttcaaaaccggaaagatatagtggcgacaacataatctacaaaccaccagggcattctgctccggatatggtgtacttgggagctatgacaaattttgatgtgacttacaattggattcaagataaatgtgttcctcttgtccgagaaataacatttgaaaatggagaggaattgacagaagaaggactgccttttctcatactctttcacatgaaagaagatacagaaagtttagaaatattccagaatgaagtagctcggcaattaataagtgaaaaaggtacaataaactttttacatgccgattgtgacaaatttagacatcctcttctgcacatacagaaaactccagcagattgtcctgtaatcgctattgacagctttaggcatatgtatgtgtttggagacttcaaagatgtattaattcctggaaaactcaagcaattcgtatttgacttacattctggaaaactgcacagagaattccatcatggacctgacccaactgatacagccccaggagagcaagcccaagatgtagcaagcagtccacctgagagctccttccagaaactagcacccagtgaatataggtatactctattgagggatcgagatgagctttaaaaacttgaaaaacagtttgtaagcctttcaacagcagcatcaacctacgtggtggaaatagtaaacctatattttcataattctatgtgtatttttattttgaataaacagaaagaaattttgggtttttaatttttttctccccgactcaaaatgcattgtcatttaatatagtagcctcttaaaaaaaaaaaaaacctgctaggatttaaaaataaaaatcagaggcctatctccactttaaatctgtcctgtaaaagttttataaatcaaatgaaaggtgacattgccagaaacttaccattaacttgcactactagggtagggaggacttagggatgtttcctgtgtcgtatgtgcttttctttctttcatatgatcaattctgttggtattttcagtatctcatttctcaaagctaaagagatatacattctggatacttgggaggggaataaattaaagttttcacactgaaaaaaaaaaaaaaaaaa

SEQ ID NO: 115 - DNA, 1402 bp, Homo sapiens
ccagtgtcggtctatccaaaaaatgtactaacagatatgtaaaccctgatgaatacagtatgtgttatgagaagtggcccaacgaagcagctcatccaagtgagattctgaagttgggctggcgagtacacgaatggctttcttactagagagaagtgggaccctgctaatctgtagcatgtggtggcatcatggttactcaaatatcactggaacagaaggtgaaagaagaaatctgaagagaaataaaacaaattttcggcggttccaagatggccgaataggaacagctccagtctacagctcccagtgtgagagatgcagaagatgggtgatttctgcatttccaactgagcaaacggcacaccagaagattatatcccatgcctggctgggagggtcccatgcccacggagcctcgctcattgctagcacagcagtctgagatccatctgcaaggtggcagtgaggctgggggaggggcacccaccattgctgaggcttgagtaggtaaacgaagcagccaggaagctcgaactgggtggagcccaccgcagctcaaggaggcctgcctacctctgtagactccacctctcggggcagggcatagccaaacaaaaggcagcagaaacctctgcagacttaaatgtccctgtctgacagctttgaagtgagtagtggatctcccagcacggagtttgagatctgagaacggacagactgccccctcaagtgggtccctgacccctgagtagcctaactgggaggcaccctccagtaggggcagactgacacctcacacagctgggtacccctctgagatgaagcttccagaggaacaatcaggcagcaacatttgctgttcagcaatatttgctgttctgcagcctctgctgctgatacccaggcaaacagggtctgcagtggacctccagcaaactccaacagactggcagctaagggtcctgactgttagaagaaaactaacaaacagaaaggacatccacaccaaaaccccatctgtaagtcaccatcatcaaagaccaaaggtagataaaaccacaaagatggggaaaaaacagagcagaaaagctgaaaactctaaaaatcagagcacctctccccctccaaaggaacacagctcctcgccagcaacggaacaaagctggatggagaatgactttgacgagttgagagaagaaggcttcagaagatcaaacttctccaagctaaaggaggaagttcgaacccatcgcaaagaagctaaaaaccctgaaaaaagattagacgaatggctaactagaataaccaatatagagaagtccttaaatgacctgatggagctgaaaaacatggcgcgagaactacatgacaaatgcacaagcttatcgataccgtcgac

SEQ ID NO: 116 - DNA, 1123 bp, Homo sapiens
  misc_feature (213)..(213): n equals a,t,g, or c
caaaaataataatagtcatcacatttgtatagcactgggtcatttttcccaagaccatttagttacttgacctcagctgttgtccagcttccagtcttggggtaatggcagcttaataatctgaaaattgccaagagaaagatgtggaaggatgaaatggaggcaacatgaatttctgtcaccttgtcatatgttctcatttccakgccttgngagcaagagagttaggtatatcttctgtaactcagacaattttcttcctctttgcagaatggcccctaggaatcaaggtagcttttcttttggaaacttcatgctgtttttagtgttgatagaaaggaggtatctgccatttctgtcacctattttattttgttgtagcacccataatagatcagctgtcacagccacaaatctctgaggagactggaatcattcccagataaatcagaaagtcagaatcactttatggttatagtcctggcttcttgagagcttgtctggaggttgtagcaggggagcacagctagtcatataccctwgactarsgaccggtctwcctctattggggatggttgtcctcttctactgagcttgcagctttgggagggacgcacatggagtggtgagggaggaaggggacacccgcctagccagccagatcagctgaatcaaccctggcaatcaatggggtgacagatgttgcagccagatcgccctcacatccagtcctaccttcttggtaacaaaacaattggttttgctggtctagaaactgtagggctagacatgtattataggactggcttagggagagttactttatattagcactcatgttttcactcatttatttcttgtagctcattaaaagaaaaaccataattgagcatctactatatgccatgcattgtgctgagtatccatgatgctcaggtgaacgggacatggtcctgtaaaaagtgtaaagtctgctgggaaagttagtgctcaaaagtgtaactaaatacttgaggcaagtgctttactagggaataaactaaatatcaagagaacaaagataagcaattccttcacgatgttttacatggtaaatccatacaattttaaaaaaaaaaaaaaa

SEQ ID NO: 117 - DNA, 1417 bp, Homo sapiens
tttttttttgattaaaaaaatttaaaaaattataaaatgatgtcctatatgagtttaatacatgacgttggaggagcatagagatagacctagactaggcatgtgtatgtgtgtgtgtgcatgtgtgtatgcatgcatgcttatgcatgtgtgtgtgcatgcatgcttgtgtgtgtgtgtgtgtgtgtgtgtagagccttggtcatcccgacagagcaaagacacaggagggtggcacatggaagaacaagtgactccaccctcccttgcacagttaaaatctggccaagtgagaggggagatgggagaggggagaggggagaaaggagaagaggcactgactggaggggctgaagctttgtccctcctgggcaggcgttctccatccacacccctcttcttggatagagaggataagcaggccaaagatgcacgaaacctgagttccactgtagctccagacttctagaaaagtcaacagcccctgtatctctagctgatcctctgttgttcaatgtctgcattaccgcactgggagacacttgacagattgggcctgccgcaggccatagcagacattgggcagccctagaacgaagctgactgtccttggaatgtgccacaggggtgtgacgccccggccaactccagtgctgcctaaaatggcctcttgcaacattcccctctcttcatcttaaatcagggacttgaagccacaaaatggcaaatacacagttctggcagtcgttttgagtattggagaaatcgctctggccatctgttttgtctccagcatgtttctcacggaatatccacggatatatccatggatataacagacatcctgccaaggcagagcttggctcttgagaactcggcaagctcagtgcttgcctggattcctgcctcatgtcccatccagtgtttggagaaaagctctgagagaaagatgaatgtctgaggccacacagcctagaagtagtcaagagcacaggctctagaactagccccacgtgggctgaaatcccagcaccagcgcctgccggctgtgtgatgtaggagagcttcttaccagctctgtgcctcacttgtctcacttgtaaaatgagaataagaattggccgggctcggtggctcacgcttgtaattccagcacttcgggaggctgaggtgggcggatcacttgaagtcaggagttcaagaccagtctggccaacgtggtggaaaccccgtctctgccaaaaatacaaaaattagccaggcgtggtggcgggcacctgcagtctcagctactcaaaaggctgaagcaggagaatcgcttgaacctgggaggtggaggctgtcagtgagccaagatcacaccactgcactgcagcctgggtgacagagcaagactctgtctcaaaaaaaaaaaagg

SEQ ID NO: 118 - DNA, 1173 bp, Homo sapiens
tcgacccacgcgtccgaaacaaaggaaaatatccccaaagttgttttctagatttgtggctttaagaaaaacaaaacaaaacaaacacattgtttttctcagaaccaggattctctgagaggtcagagcatctcgctgtttttttgttgttgttttaaaatattatgatttggctacagaccaggcagggaaagagacccggtaattggagggtgagcctcggggggggggcaggacgccccggtttcggcacagcccggtcactcacggcctcgctctcgcctcaccccggctcctgggctttgatggtctggtgccagtgcctgtgcccactctgtgcctgctgggaggaggcccaggctctctggtggccgcccctgtgcacctggccaggggaagcccgggggtctggggcctccctccgtctgcgcccacctttgcagaataaactctctcctggggtttgtctatctttgtttctctcacctgagagaaacgcaggtgttccagaggcttccttgcagacaaagcacccctgcacctcctatggctcaggatgagggatgcccccaggcccttctggttggtagtgagtgtggacagcttcccagctcttcgggtacaaccctgagcaggtcgggggacacagggccgaggcaggccttcggggcccctttcgcctgcttccgggcagggacgaggcctggtgtcctcgctccacccacccacgctgctgtcacctgaggggaatctgcttcttaggagtgggttgagctgatagagaaaaaacggccttcagcccaggctgggaagcgccttctccaggtgcctctccctcaccagctctgcacccctctggggagccttccccaccttagctgtctcctgccccagggagggatggaggagataatttgcttatattaaaaacaaaaaatggctgaggcaggagtttgggaccagcctgggctatatagcaagaccccatcactacaaattttttacaaattagctaggtgtggtggtgcgcacctgtggtcccagctactcgggaggctgtggtgggaggattgcttgagtccaggaggttgaggctgcagtcagctcagattgcaccactgcactccagcctgggcaacagagcgagacccggtctccaaaaaaaaaaaaaaa

SEQ ID NO: 119 - DNA, 547 bp, Homo sapiens
  misc_feature (1)..(1): n equals a,t,g, or c
  misc_feature (547)..(547): n equals a,t,g, or c
ncgaaaatgagaaaggtaacaatttcgaaaaagcatgcccttctgctgtgtttccagttgtttagatgtctgctctccatgtatatatggatcacattcgtgttagatggaagttgtgaatccactgttctctcaaaccggtctctttcccttgtacctatcatagtgtacatagctcaacttcctgagtttgattctagtgttcaaagataggtatttttcatataagatgtcctgtcaaagcaagtcattgaacttacctggtatttaactgaaaacaaacaaaaatcagcaatctcttccattgcttgtagaaatactgacttaggccaggcacagtggctcacgtctaatcccagcactttgagaggccaaggcaggagtatcacttgagcccaggagttcgagaccagcctggcaacatagtgagaccttgtctctgtaaaaaggaaggaaggaagggaaggagggaggggtggagggagaggaggggaggggacactctgttatacttatcgaaaggtgctatccaggtgtggtagtgcan

SEQ ID NO: 120 - DNA, 556 bp, Homo sapiens
  misc_feature (513)..(513): n equals a,t,g, or c
gaattcggcacgagaagatgggcagccaatggtgctcaaactcaaggactggcctcctggggaagattttcgagacatgatgccaaccaggtttgaagatctgatggagaaccttcctctgccagaatataccaaacgagatggcaggctcaatctggcctctaggctacctagctactttgtaaggcctgatctgggccccaagatgtacaacgcctatggtatgagggagaggctaaaattgctcttttgggggactgttgttcttatttcaactatagaaggatatctgtggtcaatgtcaggtatagagatgattgcaggcaagtgctggagaagtgaatagtatccaaggtggtcttgaatatgtttgcttttgtcatattggttttcataacatccatgtgggcccagaccataagcttacatgtctccagtagtgaggaagtttcctgttaagaactctacccaaggagccatattctcgaaggggggggccggtacccaattcgncctatagtggagtcgtattacaattcactgggccgtccgttta

SEQ ID NO: 121 - DNA, 639 bp, Homo sapiens
  misc_feature (62)..(62): n equals a,t,g, or c
  misc_feature (126)..(126): n equals a,t,g, or c
tcctttcatcttaagcaccacccgacagggcaggtactattaccatctccgtttgacagatnaggaacctggcacaggaagcatttaagtggattccccaggatcgccccactgtcaggagcagantcagaatgggcctcagcatcaggctcccaatcctggcttctaactgctgcgctctgcccttcyctcwccccacctccccactccagtgcctttggtcatgccactgcagctttcaggccaatactggattagcctcttagtgttcttgtccctgcagccatttccccaggcagcaattccatgtgccctcactgatgtaggtggctcttgtgtcatttgtcacatcctattgaattgtttatgcatcttgttcacactcacagcaccctccctctcacacgtcctccttataaaaatgtccctcagtgtctgctatgagccaggtgcagacttaagtgacagggctgctacgggaaataaaaaattaacaaggagcacctgcctcttaatgcacagtaacaaactatgttaagtgtcaggaaggaaaggttaaggatgccaggaaggcttttaataaataacctgacttagatgggcaggtggtgctgargattaagaacgtgttcttctcga

SEQ ID NO: 122 - DNA, 491 bp, Homo sapiens
ggcacgaggcaaaagcttgtgctgttagctttaaagtgtatttaaaataaatctgaaatcatttaaacagcatgaaccttggtggccaaatagatcaatgacaaagaggagaaaacctagatacaggttcatttttgccttatatgctttgagattagtgtttctatttagagctgtgactaatacagatgcatcacggctgagagcaaagcgaggtgaatgtccctattaattgccaccatggtgcgaggctggaatgagggtgtggccagctaagaggggatttgctcttcttgccctagaagttcctcattgtttcctgtcctgtcttgtgtccagctgcttagcacacttccttttggtatttaatgctttttatagctggaaccctgaggttcctcagaaatctgcacatgcttactagatggtgctctggattttctttaaagataggaagaaaaaggcaaaggcaggtctgtgacgcttcttac

SEQ ID NO: 123 - DNA, 527 bp, Homo sapiens
  misc_feature (492)..(492): n equals a,t,g, or c
  misc_feature (494)..(494): n equals a,t,g, or c
  misc_feature (522)..(522): n equals a,t,g, or c
  misc_feature (526)..(526): n equals a,t,g, or c
ggcacgagaaaaattctcaagacccatgtgaaagtcagagaggggtgtggtggcctggctggcctgaagacaggtgttctgatgattctggcaggggcccccatttgcctggcactgaaattatattagtatctttactgtatgagcaccgtgcccatcagggcaagctgtgactcctgtcaccaaacactcaggaaccattgcttttggggcctccaggatggtttcatttgtaggcatctgccttctgttggggtcctttttttctccttctctacaggggacaatatggcaccacccagcaaaacctgatgggagtggacatggactaccctcatttgcagtaatcatgggcaagcaggtggtacccacagtgtactggagaatgccctaccctcgwagggggggtcccggtaccyaattcgccctatagtgatcgtattacaattcactggccgtcgtttacaaacgtcgtgactgggaaaacctggngntacccaacttaatcgccttgcagaaatncccnt

SEQ ID NO: 124 - DNA, 985 bp, Homo sapiens
gtcggcacgagtaataaaatctaacacctgcttagagaccattcttgtagtggacacaaagtgccagcctctaatactccttccttactcttcatggaaaccttgaagagtgattaaaaatagtactgtttatgtctctgaccacagagccagtcattttcagcacttaactgaaattgctcatgatagtgtttctaacaatggccacataagtggcaaatcccttaagaattttgccctctcagcaggtggcaatctgccacctttatctgatcatttctctcctcctttggcattgtagacaccattttttcctggttatgaccctacttctctttatcttctttgtcgattgcttttccactccagggagttctgtgtttgacacacaggaggtgtgggtagttgtttactctgtaaataagttgttagccgtgcagcactgccaaggaattgcaccaaatgtgtatgcattagcagttaagaagagcgtgtgcaatgttagtgaatggagtctggtcatttgtcatccaatgcctatttagcacctgttatgtgacagataacaggccggcactcggatcataacccggagcaacatagtcagaaacaaacacaatttctctccttggtaagcctggtctgttgggaggtttgataagtaaaaagaagactgagargccgggagcggtgctcasgcctgtaatcccagtactttgggaggccgargtgggtggawcacctgaggtcaggarttcaagaccagcctggccaacatgataaaaccccgtctctactaaaaatmcaaaacctagccargcatggtggcaggcgcctataatcccagctactcgggggctgaggcagaagaatcgcttgaacccgggaggcagaggttgcagtaagccgagatagcaccatcgcactccagcctaggggacaagagcaagacttcatctcaaaaaaaaaaaaaaaaaaactcgag

SEQ ID NO: 125 - DNA, 2128 bp, Homo sapiens
gtctacctccgggctgaaacgtcaccatgcctccccacagacagacggatggacagatgggcctccctgcacctgctctgtgggtgtgggggctcctgctcagcagcagtttccagacccttctccctgctttccccaagccacccgccttgaatctggggtgctctaccagacccatcccctcatttctaaagatttgagccactagtcgtgtccctctccctcagaaatgccttggtgacacttggctgctttcaactcttccacccatctgcctcttggtctcatctttaccttctgctaaaggtcctgacccccacccccgccacgccatggggcaccccatggtggtgcgtccttgggagcagctctgtccctttccccgtggcctttgccccgcctcctatgacttcgattcccacctgtccccgacccctgggaccactgaccgggcccgatcaccctgtcactgccctgtcatctgcttaccccacacggtgctctgctgacccaggtcttgctgtctcccaacagccccacgaggcttcccgtcgctcctggacactgcaggctgagcccgctgccccgccgcctccatgaggaaggcttttcctctgtgagccccaggccaccctttccctcctttaagtaattacttaagtcccttgccagggccctcccagtaccctttctaaagacacccctgccccagcatgctgcaggctcctgctccactttcctctcaggccctcgtcgctgtggtgctgcctttgttttctgtctctgccacggcagggggtcagctccttggaggtggggcttctgcccttgctgtaccactgcctggcacacagtaggtgctcaataaagacttgcagggtgagctgcctgaagaatagtcaccagaggccagaaatgtctagagctctgccggtagggtgactggccgaggagcctggcctgcatgtgtgcgtgtgtgtgtgtgtgtgtgtgtgtgtgagtcagggtttatatgcaggtgtctacaggagacatgctgggttctgtgctgggtgtgaggaatatgggagcagaaccccagggaggtggcagagacttgggggccaaagggctggggtgcaggggggcaacagccaggtgccactggccaccccagccgcagggagccctgcccaccctccaggtgcctggatgtccaacctcactgctattcccacctcaagccaggcctggagatggaggccccatgactcagccagggccggtttgcagctgcggctgacccagacgggcgggcagcccccagcccccgggcctgcacccaggacagggccgccctccctccctcccccgcttctggctcctaggacaggattctctgaattcagctcccctgaggctggggccaggttggaggccaggcctgggggctctgggctggggtcccagataggggctgggcggccaggcttggaatctggaatccagccccattcctggcatctgcaggagcctcgtggggagggagacttgggatggacttcaaccagccagggctggattcttgccccggaacctgcattcctggggcagccaagggatccttcccacttctgggcccagcttggccctgcctggcattcgaggcccatctggggcttgggggtgtctccccaactctcagacataaggacacccttccaagcttgttccttcacctggcggggccctgagccccacacccctcccctgtcctttctccatccgacatcaagcgcctccctgcctctgctcgcacagtctctgagatggggaactcagcacctcacaggtgggcccagctctggtgctgtctgtgttgggggagctggggcagcccccaaaagaccttggagacagaccctcagaggcaggagcagaggctggcagtggatgctgtgcctggaggccttgagggcgaggtgtgatgatgaggcccaggctgcagggctctttctggctctccagctccggagaacaagggatttcctcctgctctgcccaccctccccagccagtgcatgctcagcctcagcaccgcacctgggcgccctccatgatctgccccacctggacacatggctcgagg

SEQ ID NO: 126 - DNA, 1355 bp, Homo sapiens
  misc_feature (1327)..(1327): n equals a,t,g, or c
gcccctgctggatggcactgtgggtaacctgcatcctttcactgtgcacatggttctcatgcctttacggagcagactccttggcaaataaatgcctcagtgcaggagccacacgcaaggcatttcccttctgtgtcctctttcgtgatcttgaggtgggacttgggtttgaaggctttgtcactcacctggcatgcaaactcttttgttattgtgaactctctgacagtgctttaagtctggggcacgaataaataattttccacacagctcacaactgtagggcttacatccagtgtgtgtgcgttatgtctgtgtgtgtatccttatttttttgagacggagtctccctctgtcacccaggctggagtgcagtggcgcgatctcggctcactgcaacctccgcctcctgggttcaaacgattctcctgcctcagcctcccgagtagctgggattacaggcacccaccamcacgcctggctaatttttgtatttttagtagagatggggtttctccatgttggtcaggctggtctcgatttcctgaccttgtgatccgcctgcctcggcctcccaaagtgctgtgattataggtgtgacacaccacacccggtcctgtgtatgttttgagacggagtctcactctgtcacccaggctgaagtgcagtggcaggatctcttctcactgcaacctccacctcctgggctcaagtgattctcctgcctcagcctcccaagtagctggtatttcagacttgcaccatgatgcctggctactttttatatttttagtagagacggagtttcaccagcctggtctcgaactcctgacctcaagtgatccacccaccttggcctcccaaagtactgggattacagacatgagccatcacgcccggcccctaagtggatttttaggcattctttcaggtgggcctctgtggtgaaaccttttgtgcacatttcacaaacggcttctccgctgtgtggcatttctcagctttctccactgccttcacaggaaacttcttcccgcactcctggccgacgtcgctccctaggtgactgtgcggcaaaagctcagacctcaggacactggtggctgttgtccagcctagtgtctgcttaccccgcactcatcccgtagtcacacgtgaaggcttgaggggtctggaacttcctggccgtagcaatggactttctgaactttcttgctctttcagaattgcgttttgaccctgagtgtggtcgtgggtgactcgccggcctcccgccccggggtgtggtgcctttgttctgagtcatcacaagtgccatcatcctgancctagcwtctttcagatcaccctctcga

SEQ ID NO: 127 - DNA, 791 bp, Homo sapiens
cccacgcgtccggttctcctgcttgccatcaatggagtgacagagtgtttcacatttgctgccatgagcaaagaggaggtcgacaggtacaattttgtgatgctggccctgtcctcctcattcctggtgttatcctatctcttgacccgttggtgtggcagcgtgggcttcatcttggccaactgctttaacatgggcattcggatcacgcagagcctttgcttcatccaccgctactaccgaagagcccccacaggcccctggctggcctgcacctatcgccagtcctgctcgggacatttgccctcagtggtggggttactgctgtttcggaggtattcctctgctgtgagcagggctggccagccagactggcacacattgctgtgggggccttctgtctgggagcaactctcgggacagcattcctcacagagaccaagctgatccatttcctcaggactcagttaggtgtgcccagacgcactgacaaaatgacgtgacttcagggaagcctggacacccgaggcacctggaccagctatgggtagttctgtgggtggaacacattctgtgtaagagccccactgagggctctgcagcggagtgacagcaaccccagagatgaggcaccagagagtgccactgcatgagacacctgtgaccattcgaagtctgaaatgcggggggggagtttcatttttaagtgaagaccaaaagccctttaaaaataatagttttttatcattttatagtaaaaaaaaaaaaaaaaaaaaaaaaagggcggccgc

SEQ ID NO: 128 - DNA, 2087 bp, Homo sapiens
  misc_feature (1)..(1): n equals a,t,g, or c
ncccacgcgtccgctgttgctcaaaggaaataggagttggtgtgcttgtgaccaaggggttacacttccagcttttaaaattctcctttacatgtgctcagtgttttgttttgtgttttggtttctgttttttattttaattcccacattgggcacaagaatcagaatatggatagctagtttaagaaacttttgtgggtgcactgtagcatagatgacagaatttgatgttccccccatctccaattcagttcagggcattccacagttaaacagaaatgggaacgtggggctcttataaatgaaatgggcgctcacagttttggttttcagctcttcatgtctgtaagtgtgctttgggggaggctatgtctgtatggtcgattctcagttatcacatttgcctctcctcccactaccttcatggacattcagtgctgtttcgcactgcagttagagagaagggacggacagttggtgacactcagccacattgctacttttatctgttctggtaagaagttagatagatggtagattgaagcaattgggtagaattagttgggggaatatttatgagttgctgtgtttgttgattagttccatctctttcccattttaactgagaattgattatatatagctctaagtatataggtatttaaacaaccccacaagcggctgtatcagtaacatttattaattccactatagtgagggaggatttccattctaaataccttattttgagggatttataaaacttagttgtaaaagagaaagcccacatagtgggaataaattgcttcagccatttttagtatttgagagcactagggaagatgtttagtagctgtgtggatgccttttttcacaccctgtctattgaatgctgcatccattcacgaagttaaatgttacatgcagttagtccttaatgtggactggatctgtacttttgttttggattaaaacatttaaagatttttgaagtgcagctactccccacgtggcatttgatacacataaaagtcatactgtgtgtgcacaaagagtacatggattttccagcatattgctttaaaaaattatataaactgttaaaatattaacacctcaggctacctgctgtattctgtcccattgacccctggaattggatttactgcaagtgattgataattcaattatgtggcttttcccctttaatcttgccatttaaattacagtagaaagacaaaatcaagtaaaataaagtgttagataatagaaagagtgttaagaccagcccacttttctcatgtttatgttctttcatttggaccaagaatctccgcatggaggttgatttgccactggggactttggctaagactattaggtttgctttcaactagatgttcctgagacaagcagagggacactgcaattccccttccatgcctgctgttctcccccatgtaagtcttctttgaaattaacggatgtgtctcctttggaacagccccataacaaaagagaactactgatctgagcataggaaagtagaggctctaccacttttcagttgaaaaagcaagactttctctgtgtttctgaaacaaggcataatgttgtcacagaatcagagatccagtctcacttttccacaaatctccaaatctccagtcttatcttgtgtgctctaatggtttggttcaatccctttccaactcttgttttcaaagcatggggcctgagtgttctccactcctcctaagaaaggagcttgggtggaagggaccatgctgacctcctccatcagagggctcttccagtagtattctcggatgcaacctccatttctcagttaccattatttcctgtatcagctttgtccttcctggagggatgcacagtgatccggcccaccactgttgttgtcttgtgcttctgctctttcctatggtttcaggttattttctgggtttcccctattcttcttttatttccttttttttttatatttgctttcctttctactgcttttagatttgcaggagatgcaagtttcagctcaatgtttggcttctctcaatatggaaatt

SEQ ID NO: 129 - DNA, 642 bp, Homo sapiens
ggcacgagggggccaccacacccggcctgtacatgctgttttgcatcttgctttatacgttggggagtgccagatgtcaccatctttcgttcttcctctggggctggtcaaatccccctgagaaaactcctctggcctcctggcggggggtgaaggccaggctgccagggccaggctgccagcttctgggagctgcaggggcagaggcagggagctgtcaggcattcagccagcaagacgcactcagtacccacttggggttcagaatccccctccctcatcttcagatgggccagatgtccccaaagccagcggcccctttctgtttcaccctgtctacagaataaacccccagtcactgggggtgggggaagagtaaggggagaggggaaacgagatttggaggtctagctgctgctgaaacagccctcagttcgtctttattttgccttctgcaaaactggcctggtgttgccagctccttttgaggactttgctaccggttctcagcatccctcaattgctggcttaggattcatgggtttttaggggtggggtgggattagcatgtccagctgctttccagtttccaaagttctgtccctatcatattgcctctgatttaaaaaaaaaaaaaaaaaa

SEQ ID NO: 130 - DNA, 1118 bp, Homo sapiens
  misc_feature (482)..(482): n equals a,t,g, or c
gataaattttgaacaccaggactctgaaaaagtttaagcatatatatgagaaatttcctgaaatgttgtatgtattgtcttgtcttcttaaacagaagacactgaacagaatggaatctttggttgatctctaaggaccaccattttgaggatctcttataatgtatgatgacatttttcggttcccacattttgctttttctgttttgccctttgaaagcaggccatcgtcatttggtcagttcctcctttcttactgtggctgtgtccatctctaaggggccattcttccactctacagctcaaaaaagaaaatccaggaaacagcttcccaggcctgccttcctggtccccctcagttcccaaaacacacaaaccaggacaaaacaccacttcagttttctgcatcttatagtcttacaaccttgagtttgggaggatcttgactcaagagtcagatggtgaaatatctagtacttganccccttgtgtgataatgtcaagagaactaaggtttggtcccagacccaacaataactaccaataggaatctgggtagcatcttttaaattctttagtcttcagtcttatctgtaaaacatgggactggtctagataatttctccaactccaaaattcaatcatgttcttaatattaaaaatcctcatgtccatagatttttgtattctctccctggtaaatcctggtaatttcacagggatgtttgaaactgaaaaatcctgggaaaagtagattttagtcaagtccactccaatttaaaaccatactgaagtaccattttcactcataattataaattaaaaaatgacactatcgagggttgataagattatagagagatggctattttcatgttgccagtgagaatataaaattcccatttggggaaaaaatttatactatctattcaaaagttatatgcacttaatctatgacttgacaattccatttctcatgttcattttggaggattactgacacatatcctatgcaagaatgtgattgatagcattgttttcatttgagaccagcctgggcaacatagtgagaacctgtctctacaaaaaatttaaaaaaaaaaaaaaagggcggccgc

SEQ ID NO: 131 - DNA, 682 bp, Homo sapiens
  misc_feature (624)..(624): n equals a,t,g, or c
gcaaatattaattgccatttactttgaaacctaaaatggtcaagattccattttcctccaggctaataaataataatttgcaatatatagattgtattttgtctttgaaacgctgtgaggagatcctcttaatgtggcatggtctgcttctatgccttgcttctgtgtttcttgagctccgtggagataggccccctctcctggcttctctgcttgagccacataaaatgccacttcacagctcttccctttgaagcctgatccagtatgcatttggagctaattactgcagttgacacaactccatctaaaagcgtcatgaaagattctgtaatcactgataagaaaatgatcttgcaaattattgctgtgtcctcctttattgcctctttaccttaacagtacagtttacaataatgtaaatttttttctaatctttcaactttaaccctagaaattgtagatgttttagcagtggttatgtgatattggcacaacataactatataatttgctcaatattgtggtgcatacctgtaatcccagctgctcaggagtctgaggcatgagaatcacatgaacccaggagatggaggttgcggtgagctgagagcgagtcactgnactccagccaggacgacagagtgaaaccctgtctcaaaaaaaaaaaaaaaaactcgag

SEQ ID NO: 132 - DNA, 1126 bp, Homo sapiens
ggcacgagattgcctacaaatgtcagaggtataatggtttggttttcatgctggcttctcacacagtccatcacagtgattcttggagccagagggaggtatggaagactgtgtgttctccaagggaggcactgtggtctggtggataagagtgggagtcccaatcctttctccgcagatgtgctagctgtgcactctgggcaagtttctcactctcctgagcctcagcgtctttatcaatatgacgagaataaatacagcacctgcctacctcatggggttgtttcagcagtcaatgagatcatgtatatgaagcatttagtatacctagcacctaataaaagctcaacaaccagtagtcttattactaacaaaatggagctagaaggatgcattagtttaaacaaaatcttgaggcagatactgggagtacctgtctttattcttcaacttgagtctcctcccagtttgtttggataaaaactcaaatgtaatatttttaatttgggtaaaagaacttctgagaaagggttgaacatctatccacttgcctttttatgcctagggaactagagatacttgttggcggcatcgcaaatgttgctgacttatgaagtactgcagtatctgaatacctttttgtaggataatctaaagtttccaaaaaatagtatagtgttgtagtgaagaacttggactcttaagccagattattttgttcagattcagaaatcccctccactccacccactggctgtatagccttgcccaaatcactgaatctctgtgtgtctgcgtcctggtgtgtgaaatgaggacaatagtagctattgggtagggttggcctggggtctaagtgatgactgcctgtaaggtgtttagaacagtatttggtaaacaactggcactcaatcagtgttgctgtgattatgatgatttattccaaggttgcttgctttccagtacatcatagactactacttgaccaaatttactagcaatggagtacctgaaagttttacatgtgcacatttgcatgaaaaccccacaaaatttccctttgaacagtgaaggggacggcacaaagataattcttggcactaagcttaaaaaaaaaaaaaaaaaa

SEQ ID NO: 133 - DNA, 2520 bp, Homo sapiens
acgagcgccttgaggaggatgagtccctggagctggttcctgctgcagaccctctgcctcctgcccacgggcgcagcttcgcggcgcggggcgcccggcaccgccaactgcgagctcaagccccaacaaagcgagctgaattccttcttgtggaccattaagcgagacccaccatcttacttctttggcacaatccatgtcccgtacacccgagtttgggacttcatccccgacaactctaaggaggctttcctgcagagcagcattgtgtactttgagttggatctcacagacccctataccatctcagctctcaccagctgtcagatgctgccacagggcgagaacctccaagatgtgctccccagggacatctactgccgcctcaagcgccacctggagtatgtcaagctcatgatgcccttgtggatgaccccagaccagcgcggcaaggggctctacgcagactacctcttcaatgctattgccggaaactgggagcgcaagaggcctgtctgggtgatgctcatggtcaactccctgactgaagtggacattaagtcccgtggagtgcctgtcttagacctgttccttgcccaggaggctgagcggctgaggaaacagactggggcagtggaaaaggtggaagagcagtgccatccattgaatgggttgaacttttcacaggtcatctttgctttgaaccagaccctcctgcagcaggaaagcctgcgagcaggcagtcttcagatcccctacacgacggaggatctcatcaaacactataactgcggggacctcagctccgtcatcctcagccatgacagctcccaggttcccaattttattaatgccacgctaccacctcaggagcgcatcactgctcaggagattgacagctacttacgccgggagctgatctacaagcggaatgagagaatagggaagcgggtgaaggcccttttggaggagttccctgacaaaggcttcttctttgcctttggagctgcttcacagtagccttgaaaatcaggagccttgaactacagtagctgtgaaaactgtttgcctaatggttactggaggggacagaatgggttcaaagttcctccaaagctccatccttaaagaatcatcactatttgacatgtccaatagttccctgaaatttccattcccaagcttgtcttcatttgacctgactcagagcttgctctgtgtgaatagccctattcttagggtgtgtgttgaaaacaatcagtagcagctgtttaacatcatagttgctggaaatagcaatattaattgaagcttacaaggggctgcccaaaaaacttaaaagcaaaatcccatagggggtatagaaaagctctaaaatattcctagagagtcacatgcatgagaagagctgtgcacatgcccaggaaagacctgagaaggtcctaatctctcacctctggctgatcttgaggctctgtgtaagcagagtgtgaaagctaaggcaaagtcataaattgcctgttgaagcatcaaatacatgcccccaaactcacacagcccctctgcaaaggttgggaaacttgcaaggaatttaaggaaatctctgttcagtcattagccagccactaaactaactgagcagatccttcagtgatcacacacaacaaagaatacagactttacagacttagtcctagaaaatcactacacaaacagcaacaacaatgcacctgggactaagggagaggagatgagttccagagttggtatattatttaaatgtctagttttcaataaaaacaattataagacacagagcaaaactagaaagtatggcccatacccagggaaaaacaagcaaccaatagaagctgtccttgaggaagttaatatcttggacttactagaaaatgactttaacactagttattataaatatgttcaaaaaactaaaagaggccaggtgcggaggctcacgcctataatcccagcactttgggaggctgaagcaggtgggtcacctgaggtcaggagtttgagaccagcctgaccaatatggcaaaaccctatctctactaataatacaaaaattagccaggcgttgtggcgcacacctgtaatcccagctacttgggaggctgaagcaggagaactgcttgaaactgggaggaagaggttgcagtaagctgagatcacaccactgtactccagcctgggccacaagagtgaaactccatctccaaaaaaaaaaaaaaaaaaaaaaaccctaaaattaaccatatctaaagaattaaaggaaagtttgagaacaatatctcaccaatacagaatatcaataaaaatataaaaattattttaaaagaaccaaataggaattctggaatttaaagtgtaggaactgaaatgaaaaattcactacgggggctgaacagtagatttgaactggcagaagaagaatcaacatacatgaagataggttgattgagatgattcagtatgagaaagaaaaaaaaaaaaaaa

SEQ ID NO: 134 - DNA, 1462 bp, Homo sapiens
ggccatcggcggggcagtcgcgggatgcgcccgggagccacagcctgagctttagcccatgaggaggatgtgaccgggactgagtcaggagccctctggaagcatggagactgtggtgattgttgccataggtgtgctggccaccatctttctggcttcgtttgcagccttggtgctggtttgcaggcagcgctactgccggccgcgagacctgctgcagcgctatgattctaagcccattgtggacctcattggtgccatggagacccagtctgagccctctgagttagaactggacgatgtcgttatcaccaacccccacattgaggccattctggagaatgaagactggatcgaagatgcctcgggtctcatgtcccactgcattgccatcttgaagatttgtcacactctgacagagaagcttgttgccatgacaatgggctctggggccaagatgaagacttcagccagtgtcagcgacatcattgtggtggccaagcggatcagccccagggtggatgatgttgtgaagtcgatgtaccctccgttggaccccaaactcctggacgcacggacgactgccctgctcctgtctgtcagtcacctggtgctggtgacaaggaatgcctgccatctgacgggaggcctggactggattgaccagtctctgtcggctgctgaggagcatttggaagtccttcgagaagcagccctagcttctgagccagataaaggcctcccaggccctgaaggcttcctgcaggagcagtctgcaatttagtgcctacaggccagcagctagccatgaaggcccctgccgccatccctggatggctcagcttagccttctactttttcctatagagttagttgttctccayggctggagagttcagctgtgtgtgcatagtaaagcaggagatccccgtcagtttatgcctcttttgcagttgcaaactgtggctggtgagtggcagtctaatactacagttaggggagatgccattcactctctgcaagaggagtattgaaaactggtggactgtcagctttatttagctcacctagtgttttcaagaaaattgagccaccgtctaagaaatcaagaggtttcacattaaaattagaatttctggcctctctcgatcggtcagaatgtgtggcaattctgatctgcattttcagaagaggacaatcaattgaaactaagtaggggtttcttcttttggcaagacttgtactctctcacctggcctgtttcatttatttgtattatctgcctggtccctgaggcgtctgggtctctcctctcccttgcaggtttgggtttgaagctgaggaactacaaagttgatgatttcttttttatctttatgcctgcaattttacctagctaccactaggtggatagtaaatttatacttatgtttccctcaaaaaaaaaaaaaaaaaactcgag

SEQ ID NO: 135 - DNA, 2079 bp, Homo sapiens
ggcacgagggaggcgcggctgcgggacctgactagattctacgacaaggtactttctttgcatgaggattcaacaacccctgtggctaaccctctgcttgcatttactctcatcaaacgcctgcagtctgactggaggaatgtggtacatagtctggaggccagtgagaacatccgagctctgaaggatggctatgagaaggtggagcaagaccttccagcctttgaggaccttgagggagcagcaagggccctgatgcggctgcaggacgtgtacatgctcaatgtgaaaggcctggcccgaggtgtctttcagagagtcactggctctgccatcactgacctgtacagccccaaacggctcttttctctcacaggggatgactgcttccaagttggcaaggtggcctatgacatgggggattattaccatgccattccatggctggaggaggctgtcagtctcttccgaggatcttacggagagtggaagacagaggatgaggcaagtctagaagatgccttggatcacttggcctttgcttatttccgggcaggaaatgtttcgtgtgccctcagcctctctcgggagtttcttctctacagcccagataataagaggatggccaggaatgtcttgaaatatgaaaggctcttggcagagagccccaaccacgtggtagctgaggctgtcatccagaggcccaatataccccacctgcagaccagagacacctacgaggggctatgtcagaccctgggttcccagcccactctctaccagatccctagcctctactgttcctatgagaccaattccaacgcctacctgctgctccagcccatccggaaggaggtcatccacctggagccctacattgctctctaccatgacttcgtcagtgactcagaggctcagaaaattagagaacttgcagaaccatggctacagaggtcagtggtggcatcaggggagaagcagttacaagtggagtaccgcatcagcaaaagtgcctggctgaaggacactgttgacctaaaactggtgaccctcaaccaccgcattgctgccctcacaggccttgatgtccggcctccctatgcagagtatctgcaggtggtgaactatggcatcggaggacactatgagcctcactttgaccatgctacgtcaccaagcagccccctctacagaatgaagtcaggaaaccgagttgcaacatttatgatctatctgagctcggtggaagctggaggagccacagccttcatctatgccaacctcagcgtgcctgtggttaggaatgcagcactgttttggtggaacctgcacaggagtggtgaaggggacagtgacacacttcatgctggctgtcctgtcctggtgggagataagtgggtggccaacaagtggatacatgagtatggacaggaattccgcagaccctgcagctccagccctgaagactgaactgttggcagagagaagctggtggagtcctgtggctttccagagaagccaggagccaaaagctggggtaggagaggagaaagcagagcagcctcctggaagaaggccttgtcagctttgtctgtgcctcgcaaatcagaggcaagggagaggttgttaccaggggacactgagaatgtacatttgatctgccccagccacggaagtcagagtaggatgcacagtacaaaggaggggggagtggaggcctgagagggaagtttctggagttcagatactctctgttgggaacaggacatctcaacagtctcaggttcgatcagtgggtcttttggcactttgaaccttgaccacagggaccaagaagtggcaatgaggacacctgcaggaggggctagcctgactcccagaactttaagactttctccccactgccttctgctgcagcccaagcagggagtgtccccctcccagaagcatatcccagatgagtggtacattatataaggattttttttaagttgaaaacaactttcttttctttttgtatgatggttttttaacacagtcattaaaaatgtttataaatcaaaaaaaaaaaaaaaaaaa

SEQ ID NO: 136 - DNA, 2794 bp, Homo sapiens
  misc_feature (164)..(164): n equals a,t,g, or c
aaaaagaaatcttgcatttgacacatgaaaaagtaactaaaagcttgcacggagatatattaagcccttgcactaaaaatgctggtactgtttaaattcctcccgttgacttcaagtgggcgcttttcatccgtaacattgtatcaccgggtgcaccaccagancgttttttcgcaggaagcgaagtcattctctccggcgtctacacttaacttgtatatttgttctagccaatttcagtcacttcagaaactttactgtggcgtaattccagttcttaggtacgcgagcatagagtgaaaaaatagctgtgattgttcttatgtaaaaatcaaagctccaatggaagttaatgaatacctttgtaataatggaatctatttgccctttatttcttaatcttctgttttaaactgctgctattaaaaacacacccatgttattaggtttacggaagttgagctgtcgttcaagttcttggcgtccggaaaggtgtccgtgccatgggcttgtgacccggtcctggatacaccagaaacatcaccttcttgccacctaaaagagaatcgcactcacaaacgctgtcacaaccgtctttatgacatcaatctcccttgttccggttctctttttacaaaaaagaatttacttcattaaacaatttccgtctctagtttaaacagaaggtggaaaaaaatagaccccggtctagactcattttctccagtccacattggaatgggtttaagaatatcctcttccaaacaaaacaagacgatttgtactttgtgtctaagatgtctaagatgaaacgtttaaaactctgattaccacaattttggattttttgttaaaatcaaatgtattttcaaacttactgtgttacaatattatagttaaaaagtacagggagagcagaagccctgatctaagaggtgagtcattgtcctcatgttgctgctaacttgaattgcagaagagaaaatctcagtgccttctgcctggctttttgatggagtttgcttaacacccttcatctttctgtttctctccatgtaactaaatgacgttttaaaaattcagtgctgaggtgtctgggtagcacagcggttgagcctccgatttttggtttcaactcaggtcacgatctcagggtcatgggatcgagccccacaacaggctccacgctcagccgggagtgtgcttaagtttctcgctctgcccctgcccttccccttcccctgctgcgtgcacctatgcactctctctctcaaataaacaaataaatctttaaaaataaataaataaaacacagtgcataccataaaacattaagtaatatgcgttagggaagcatttgagatcatgcatagcttatatatttcaaaaaggatttgttcacatcagtacaatagatagatataaaagaagcaattcttggagcgtctgggtaaagaaggtagtgctccggctcagcaggctttcccgtcaagccactgatctccacccggctctcccgtgttcctcttcaataactgagtgcagtctatgagcagatgctgccttctgccacataaagtatccttaacttttactttgctttgagtttaaaccagcattgaaatgtaaatcacgtcttcctcatgcatgaaattgtgagggaagtcagagaggttctctaagagtttatttagcaatgaggaaacaggacaaagaggaggtagtcccatagtggggagggtgggaggcggggtctgccgggcagcactgggtccagcgtctccctttccctagctttctcccaattttctttaggaaaaatgatgtcatagtgagatttcctataacagaatgtttctaaggttcactgtatggacccagaccccagacggttgtcttataagcgaacttagaacggatgctgggaactaagtacttgagtgttgacttgctcacctgcgtgggacagagggacaagccagcaagcccccatgaagtgacgggcagccccacctgggccctggagagaccgacgcaccctctcagctggggtgcagagaaaggattggtttgggggatagcagtggactgtcagaagaacttacgggatcctattgtaatgtaagctatgaatcaggcttgctgtcctgggactgaggttgtaacccgtgaacgacgcaccaacacaggcagctgatgcgtttgctttggcttccaatttgctaatataaaaatctagacttgtttcatgaaaacaggacatttaaacattctatgaatattctccaaaaatatttggggaaacctatgtacacatttctgttggactgacacctagaaatcaaattgttgtgacagaggatgtgcctatgttcagcttcagtaaatactgccggagagatctctgaatgataaacagttaacggaaaatcgcaccaaaccaggctgttggaggcaacaacccattgggctagtttctggtggcctgctgcagccacgcaggcgagcactgggcttcagactgcacgggactctctttgtccacctgtcctgtgcctggccccacaccaggatgctggcgattatcaaatacactttactggtgattacctttgagcatatttgctttcacaaatcagttctgtaactttgtgtgcattgggctaaattttacaaactaatcattggttaaaaggaagtggcctaaggtccccagtcttgctgatatcagggcagctgctcctttggggttcctcgtcttccatgggtgaagcatgggagtgaggggccccat

SEQ ID NO: 137 - DNA, 2048 bp, Homo sapiens
acgcgtccgggaaaggagacgctggtgatggggttaggaaaaagtgggactcctccccacgaccattgctattatccagatcatttctaaggattcggtttctgccatttctgacagctgcttgaggccgagtgaacgtggttttggaagattgcttaaacaaagaatggaggccagagtggtgcacgcattgcagaaaaggcaagtgtcacttctttgtgtgtttctgggagtgtcttgggctggcgcagaacctcttcggtattttgtggcagaggaaacggagagagggacctttctggccaacctagcaattgatctggggttaggggtggaggaactgtcagctcggggatgtagaattgtttcagatgagaccataggatttttactcctcaatccgcttactggtgatttacttctaaatgagaaattagaccgagaggaactgtgtggccccacagagccatgtgtgttgcctttccagttgttacttgaaaagccttttcagattttccgtgctgaactatgggtcagagacatcaacgatcattctccagtatttctagatagagagattaccttgaacatattagaaagtaccactccaggggcaacatttctcctagaaagtgcacatgattcagatgttggaatcaacaacctgagaaactacaccatcagctccaatgtttatttccatattaatgtccatgataacggggaagggaatgtttattccgaattggtactagataaagtgctggatcgtgaagaggttcctgagctgcgtttaaccctcaccggcttggatggcggttctccgcccagatccggaaccaccctcatacgcatcctggttttggacataaatgacaacgtccctgaatttgtagagtcgctttacaaggtccaggtgcctgagaacagccctgttggttccctggttgtcactgtgtcagctagagatttagataccggaagtaatggagaaatcgtctatgcatttttttacgctactgaaagaactctcaaaacgtttcgaatcaattcaacatctggcaatcttcatcttaaagccgaattgaactacgaggcaatacaaacttatacattaactattcaggccaaagatggtggagggctttctggaaaatgtactgtggtggtccatgtaacagatataaacgataatccaccagaactgctcatgtcatcacttactagcccaatcccagaaaactcaccagagacagtagtcgctgtttttaggattagagacagagattcagggaacaatgcaaagatggtgtgctccatccaagaccatctccccttcgtcctgaagccatcagtagagaatttctacaccttggtaacagagagagcactagacagagaagaaagaaccgagtacaacatcaccatcaccgtcaccgacctggggacccccaggctgaaaacccagcacaacctcacggtgaccgtgtccgacgtcaacgacaacgccccgaccttcagccagacgacttacaccctgcgcgtccgcgagaacaacagccccgccctgcacatcggcagcgtgagcgccaccgacagagactcgggcgccaacgcccaggtcacctactcgctgctgccgccccacgacccgcagctgccgctgggctcgctggtgtccatcaacgcggacaacgggcagctgttcgcgctcaggtcgctggatttcgaggcgctgcaggcgttcgagttccgcgtgggcgcggccgaccgcggctcgccggcgctcagcagccaggcgctggtgcgcgtgctggtggcggacgccaacgacaacgcgccgttcgtgctgtacccgctgcagaacggctcggcgccctgcaccgagctggtgccgcgggcggccgaggcgggctacctggtggccaaggtggtggcggtggacggcgactcgggccagaacgcctggctgtcgtaccagctgctcaaggccacggagcccgggctgttcggcgtgtgggcgcacaacggcgaggtgcgcacggcgc

SEQ ID NO: 138 - DNA, 1669 bp, Homo sapiens
ccacgcgtccggcacggtcgccaggcaccgctgaccgaggcctgctgggattccagaattggagagggaggcaccatgaagactctcctgctgctggtggggctgctgctgacctgggagaatggacgggttctgggagaccagatggtctcagacactgagctccaggaaatgtccaccgaggggagtaagtacattaatcgggaaattaaaaatgctctcaagggggtgaagcagataaagacactaatagaacaaacaaacgaggagcgcaaatccctgctcaccaacttggaagaagccaagaagaagaaagaggatgccctgaatgacaccaaggattcagaaatgaagctgaaggcgtcgcagggggtgtgcaatgacaccatgatggccctctgggaggagtgtaagccctgcctgaaacagacctgtatgaagttctacgcccgagtctgcagaagcagcacagggctggttggccaccaggttgaggagttcctgaaccagagttctcccttctacttctggattaatggcgaccgcatcgactccctgctggagaacgaccggcagcagacccacgccctggatgtcatgcaggacagtttcgaccgggcatccagcatcatggatgagctgttccaggacagattcttcacccgtgaggcccaggaccctttccacttctcacccttcagctcattccagcggaggccttttttcttcaatatcaagcaccgctttgcccggaacataatgcctttccctggctaccagcccttgaatttccacgacatgtttcagcccttcttcgacatgatacaccaggctcagcaggccatggatgttaacctgcacagactcccccactttccaatggaattcacagaagaagacaaccaggacggcgccgtgtgcaaggagatccgtcacaactccacagggtgcctgaagatgaaggaccagtgtgaaaagtgccgggagatcttgtctgtggactgttcgtccaacaaccccgctcaggtccagctgcgacaggaacttaataattccctccagattgcagagaagttcaccaagcttgtacgacgagctgctgcagtcctaccaggagaagatgttcaacacgtcctccctgctgaagcagctggacgagcagtttagctgggtgtcccagctggcgaatctcactcagactgaggacccgttctatctccaggtcacgacggtgagttcccagacttctgactccagtgctccctctggcgtcactaaggtggttgtgaagctctttgattccgaccccatcaccgtgatcctcccagaagacctctccaggaacaatcctaaatttatggagaccgtggcagagaaagcccttcaggaataccgccagaagagccgggaggagtgagatgggaacactgcctctccacatggcaggtgtctgagttctgtcgcccccgcgatgagcgataggcccctagagagagctctgcatgtcaccgagtgaccgggccttccttgaggccctcctgtcccctcaccccgcctgtcctccctctggactctgcattgtaacaccgtgttcactgatcatgggaagaactcctgtgtgccactaactcaataaaaccaccagtaatctgaaaaaaaaaaaaaaaaa

SEQ ID NO: 139 - DNA, 2087 bp, Homo sapiens
  misc_feature (56)..(56): n equals a,t,g, or c
tcgacccacgcgtccgtggggccgagcgccgctgggtaggcggaagtagccgcagnatggcggcggctatgccgcttgctctgctcgtcctgttgctcctggggcccggcggctggtgccttgcagaacccccacgcgacagcctgcgggaggaacttgtcatcaccccgctgccttccggggacgtagccgccacattccagttccgcacgcgctgggattcggagcttcagcgggaaggagtgtcccattacaggctctttcccaaagccctggggcagctgatctccaagtattctctacgggagctgcacctgtcattcacacaaggcttttggaggacccgatactgggggccacccttcctgcaggccccatcagacactgaccactactttctgcgctatgctgtgctgccgcgggaggtggtctgcaccgaaaacctcaccccctggaagaagctcttgccctgtagttccaaggcaggcctctctgtgctgctgaaggcagatcgcttgttccacaccagctaccactcccaggcagtgcatatccgccctgtttgcagaaatgcacgctgtactagcatctcctgggagctgaggcagaccctgtcagttgtatttgatgccttcatcacggggcagggaaagaaagactggtccctcttccggatgttctcccgaaccctcacggagccctgccccctggcttcagagagccgagtctatgtggacatcaccacctacaaccaggacaacgagacattagaggtgcacccacccccgaccactacatatcaggacgtcatcctaggcactcggaagacctatgccatctatgacttgcttgacaccgccatgatcaacaactctcgaaacctcaacatccagctcaagtggaagagacccccagagaatgaggcccccccagtgcccttcctgcatgcccagcggtacgtgagtggctatgggctgcagaagggggagctgagcacactgctgtacaacacccacccataccgggccttcccggtgctgctgctggacaccgtaccctggtatctgcggctgtatgtgcacaccctcaccatcacctccaagggcaaggagaacaaaccaagttacatccactaccagcctgcccaggaccggctgcaaccccacctcctggagatgctgattcagctgccggccaactcagtcaccaaggtttccatccagtttgagcgggcgctgctgaagtggaccgagtacacaccagatcctaaccatggcttctatgtcagcccatctgtcctcagcgcccttgtgcccagcatggtagcagccaagccagtggactgggaagagagtcccctcttcaacagcctgttcccagtctctgatggctctaactactttgtgcggctctacacggagccgctgctggtgaacctgccgacaccggacttcagcatgccctacaacgtgatctgcctcacgtgcactgtggtggccgtgtgctacggctccttctacaatctcctcacccgaaccttccacatcgaggagccccgcacaggtggcctggccaagcggctggccaaccttatccggcgcgcccgaggtgtccccccactctgattcttgccctttccagcagctgcagctgccgtttctctctggggaggggagcccaagggctgtttctgccacttgctctcctcagagttggcttttgaaccaaagtgccctggaccaggtcagggcctacagctgtgttgtccagtacaggagccacgagccaaatgtggcatttgaatttgaattaacttagaaattcatttcctcacctgtagtggccacctctatattgaggtgctcaataagcaaaagtggtcggtggctgctgtattggacagcacagaaaaagatttccatcaccacagaaaggtcggctggcagcactggccaaggtgatggggtgtgctacacagtgtatgtcactgtgtagtggatggagtttactgtttgtggaataaaaacggctgtttccgtgrwwaaaaaaaaaaaaaaaaagggcggccgctctagaggatccctcga

SEQ ID NO: 140 - DNA, 2571 bp, Homo sapiens
ccacgcgtccggtaatcttcaaatatgcgcatggcgagtattatggtctgggtgatgatcatcatggtgattctggtgctgggctacggaatatttcactgctacatggagtactcccgactgcgtggtgaggccggctctgatgtctctttggtggacctcggctttcagacggatttccgggtgtacctgcacttacggcagacctggttggcctttatgatcattctgagtatccttgaagtcattatcatcttgctgctcatctttctccggaagagaattctcatcgcgattgcactcatcaaagaagccagcagggctgtgggatacgtcatgtgctccttgctctacccactggtcaccttcttcttgctgtgcctctgcatcgcctactgggccagcactgctgtcttcctgtccacttccaacgaagcggtctataagatctttgatgacagcccctgcccatttactgcgaaaacctgcaacccagagaccttcccctcctccaatgagtcccgccaatgccccaatgcccgttgccagttcgccttctacggtggtgagtcgggctaccaccgggccctgctgggcctgcagatcttcaatgccttcatgttcttctggttggccaacttcgtgctggcgctgggccaggtcacgctggccggggcctttgcctcctactactgggccctgcgcaagccggacgacctgccggccttcccgctcttctctgcctttggccgggcgctcaggtaccacacaggctccctggcctttggcgcgctcatcctggccattgtgcagatcatccgtgtgatactcgagtacctggatcagcggctgaaagctgcagagaacaagtttgccaagtgcctcatgacctgtctcaaatgctgcttctggtgcctggagaagttcatcaaattccttaataggaatgcctacatcatgattgccatctacggcaccaatttctgcacctcggccaggaatgccttcttcctgctcatgagaaacatcatcagagtggctgtcctggataaagttactgacttcctcttcctgttgggcaaacttctgatcgttggtagtgtggggatcctggctttcttcttcttcacccaccgtatcaggatcgtgcaggatacagcaccacccctcaattattactgggttcctatactgacggtgatcgttggctcctacttgattgcacacggtttcttcagcgtctatggcatgtgtgtggacacgctgttcctctgcttcttggaggacctggagaggaatgacggctcggccgagaggccttacttcatgtcttccaccctcaagaaactcttgaacaagaccaacaagaaggcagcggagtcctgaaggccccgtgctccccacctctcaaggagtctcatgccgcagggtgctcagtagctgggtctgttcccccagccccttgggctcacctgaagtcctatcactgccgctctgcccctccccatgagccagatcccaccagtttctggacgtggagagtctggggcatctccttcttatgccaaggggcgcttggagttttcatggctgcccctccagactgcgagaaacaagtaaaaacccattggggcctcttgatgtctgggatggcacgtggcccgacctccacaagctccctcatgcttcctgtcccccgcttacacgacaacgggccagaccacgggaaggacggtgtttgtgtctgagggagctgctggccacagtgaacacccacgtttattcctgcctgctccggccaggactgaaccccttctccacacctgaacagttggctcaagggccaccagaagcatttctttattattattattttttaacctggacatgcattaaagggtctattagctttctttccgtctgtctcaacagctgagatggggccgccaaggagtgccttccttttgctccctcctagctgggagtgacgggtgggagtgtgtgtgcccaggtgggggtgtctcctggctgggaaggagggaaagggagggagagttttgcgggggttggcagtggagagcaggctggagaggagatggctaatagctgtttaatggaaacctgctgggctggagggagttaggctgaatttcccgacttcctctgccagttattgacacagctctctttgtaagagaggaaagaaactaaacccacccaagggatgatttcagggggagaggtggagggcagatgtcctgggcaaaccgggcccctctgcccacacacctcacttgatccttttgccaaacttgtcaaactcaggggaactggcttcccagttgcccctttgccatattccaagtccccctcagacttcatgtctctgctcatcagcactgtcccaggatcctggagagggagaacccctggccccaggggaaagaggggggggtctcccgtttcctgtgcctgcaccagccctgcccccattgcgtctgcacacccctgcgtgtaactgcattccaaccactaataaagtgcctattgtacaggaaaaaaaaaaaaaaa

SEQ ID NO: 141 - DNA, 4712 bp, Homo sapiens
catggtacgcctgcaggtaccggtccggaattcccgggtcgacccacgcgtccgcccaygcgtccggcggctccgagccaggggctattgcaaagccagggtgcgctaccggacggagaggggagagccctgagcagagtgagcaacatcgcagccaaggcggaggccgaagaggggcgccaggcaccaatctccgcgttgcctcagccccggaggcgccccagagcgcttcttgtcccagcagagccactctgcmtgcgcctgcctctcagtgtmtccaactttgcgctggaagaaaaacttcccgcgcgccggcagaactgcagcgcctcctcttagtgactccgggagcttcggctgtagcckgctmtgcgcgcccttccaacgaataatagaaattgttaattttaacaatccagagcaggccaacgaggctktgctctcccgacccgaactaaagctccctcgctccgtgcgctgctacgagcggtgtctcctggggctccaatgcagcgagctgtgcccgaggggttcggaaggcgcaagctgggcagcgacatggggaacgcggagcgggctccggggtctcggagctttgggcccgtacccacgctgctgctgctcsccgcggcgctactgsccgtgtcggacgcactcgggcgcccctccgaggaggacgaggagctagtggtgccggagctggagcgcgccccgggacacgggaccacgcgcctccgcctgcacgcctttgaccagcagctggatctggagctgcggcccgacagcagctttttggcgcccggcttcacgctccagaacgtggggcgcaaatccgggtccgagacgccgcttccggaaaccgacctggcgcactgcttctactccggcaccgtgaatggcgatcccagctcggctgccgccctcagcctctgcgagggcgtgcgcggcgccttctacctgctgggggaggcgtatttcatccagccgctgcccgccgccagcgagcgcctckccaccgccgccccaggggagaagccgccggcaccactacagttccacctcctgcggcggaatcggcagggcgacgtaggcggcacgtgcggggtcgtggacgacgagccccggccgactgggaaagcggagaccgaagacgaggacgaagggactgagggcgaggacgaagggcctcagtggtcgccgcaggacccggcactgcaaggcgtaggacagcccacaggaactggaagcataagaaagaagcgatttgtgtccagtcaccgctatgtggaaaccatgcttgtggcagaccagtcgatggcagaattccacggcagtggtctaaagcattaccttctcacgttgttttcggtggcagccagattgtwcaaacaccccagsattcgtaattcagttagcctggtggtggtgaagatcttggtcatccacgatgaacagaaggggccggaagtgacctccaatgctgccctcactctgcggaacttttgcaactggcagaagcagcacaacccacccagtgaccgggatgcagagcactatgacacagcaattcttttcaccagacaggacttgtgtgggtcccagacatgtgatactcttgggatggctgatgttggaactgtgtgtgatccgagcagaagctgctccgtcatagaagatgatggtttacaagctgccttcaccacagcccatgaattaggccacgtgtttaacatgccacatgatgatgcaaagcagtgtgccagccttaatggtgtgaaccaggattcccacatgatggcgtcaatgctttccaacctggaccacagccagccttggtctccttgcagtgcctacatgattacatcatttctggataatggtcatggggaatgtttgatggacaagcctcagaatcccatacagctcccaggcgatctccctggcacctcgtacgatgccaaccggcagtgccagtttacatttggggaggactccaaacactgccctgatgcagccagcacatgtagcaccttgtggtgtaccggcacctctggtggggtgctggtgtgtcaaaccaaacacttcccgtgggcggatggcaccagctgtggagaagggaaatggtgtatcaacggcaagtgtgtgmacaaaaccgacagaaagcattttgatacgccttttcatggaagctggggaatgtgggggccttggggagactgttcgagaacgtgcggtggaggagtccagtacacgatgagggaatgtgacaacccagtcccaaagaatggagggaagtactgtgaaggcaaacgagtgcgctacagatcctgtaaccttgaggactgtccagacaataatggaaaaacctttagagaggaacaatgtgaagcacacaacgagttttcaaaagcttcctttgggagtgggcctgcggtggaatggattcccaagtacgctggcgtctcaccaaaggacaggtgcaagctcatctgccaagccaaaggcattggctacttcttcgttttgcagcccaaggttgtagatggtactccatgtagcccagattccacctctgtctgtgtgcaaggacagtgtgtaaaagctggttgtgatcgcatcatagactccaaaaagaagtttgataaatgtggtgtttgcgggggaaatggatctacttgtaaaaaaatatcaggatcagttactagtgcaaaacctggatatcatgatatcatcacaattccaactggagccaccaacatcgaagtgaaacagcggaaccagaggggatccaggaacaatggcagctttcttgccatcaaagctgctgatggcacatatattcttaatggtgactacactttgtccaccttagagcaagacattatgtacaaaggtgttgtcttgaggtacagcggctcctctgcggcattggaaagaattcgcagctttagccctctcaaagagcccttgaccatccaggttcttactgtgggcaatgcccttcgacctaaaattaaatacacctacttcgtaaagaagaagaaggaatctttcaatgctatccccactttttcagcatgggtcattgaagagtggggcgaatgttctaagtcatgtgaattgggttggcagagaagactggtagaatgccgagacattaatggacagcctgcttccgagtgtgcaaaggaagtgaagccagccagcaccagaccttgtgcagaccatccctgcccccagtggcagctgggggagtggtcatcatgttctaagacctgtgggaagggttacaaaaaaagaagcttgaagtgtctgtcccatgatggaggggtgttatctcatgagagctgtgatcctttaaagaaacctaaacatttcatagacttttgcacaatggcagaatgcagttaagtggtttaagtggtgttagctttgagggcaaggcaaagtgaggaagggctggtgcagggaaagcaagaaggctggagggatccagcgtatcttgccagtaaccagtgaggtgtatcagtaaggtgggattatgggggtagatagaaaaggagttgaatcatcagagtaaactgccagttgcaaatttgataggatagttagtgaggattattaacctctgagcagtgatatagcataataaagccccgggcattattattattatttcttttgttacatctattacaagtttagaaaaaacaaagcaattgtcaaaaaaagttagaactattacaacccctgtttcctggtacttatcaaatacttagtatcatgggggttgggaaatgaaaagtaggagaaaagtgagattttactaagacctgttttactttacctcactaacaatggggggagaaaggagtacaaataggatctttgaccagcactgtttatggctgctatggtttcagagaatgtttatacattatttctaccgagaattaaaacttcagattgttcaacatgagagaaaggctcagcaacgtgaaataacgcaaatggcttcctctttccttttttggaccatctcagtctttatttgtgtaattcattttgaggaaaaaacaactccatgtatttattcaagtgcattaaagtctacaatggaaaaaaagcagtgaagcattagatgctggtaaaagctagaggagacacaatgagcttagtacctccaacttcctttctttcctaccatgtaaccctgctttgggaatatggatgtaaagaagtaacttgtgtctcatgaaaatcagtacaatcacacaaggaggatgaaacgccggaacaaaaatgaggtgtgtagaacagggtcccacaggtttggggacattgagatcacttgtcttgtggtggggaggctgctgaggggtagcaggtccatctccagcagctggtccaacagtcgtatcctggtgaatgtctgttcagctcttctgtgagaatatgattttttccatatgtatatagtaaaatatgttactataaattacatgtactttataagtattggtttgggtgttccttccaagaaggactatagttagtaataaatgcctataataacatatttatttttatacatttatttctaatgaaaaaaacttttaaattatatcgcttttgtggaagtgcatataaaatagagtatttatacaatatatgttactagaaataaaagaacacttttggaaaaaaaaaaa

SEQ ID NO: 142 - DNA, 1051 bp, Homo sapiens
ggtttttcccgggatacatctgtgttgagtcactttgcattcaacagtgcctcgccaccaaaatcatacataagaggaaaactaggactggaagaatatgctgtcttttacccaccaaatggtgttatcccttttcatggattttcaatgtatgttgcaccactttgttttctataccatgaaccttccaaattgtatcagatattccgtgagatgtatgtgcgttttttcttcagactccattccatctcttctcatccttctggtattgtgtcactctgtctgctgtttgaaactcttcttcaaacttatcttccccaactcttttatcatctacgagaaattggggctcaaccacttcgcatatcatttaagtggatggttcgagctttctctggatacttagctacagatcagctcttgcttttatgggatagaatcctaggatacaactctctggaaattcttgctgtgctggcagctgccgtgtttgctttccgagcagtgaacctgatggaggtgacatcactggctgcagctgaaaatctagctgcccacagtgaacagttctgcactgctcctctattccctgagctttacagagtccagatccctgtactgctgaactcaggcagaaagaagagtgcagtttattggactccaatctcattcaacagaacaaagaagttgaggttgcaaggaagaacctataatgatgggtcatggaatataacctagaaaagaagagaaataaaagagactgtgtttcaccatgttgcccaggctggtctcgaacttctgagctcaagcaatccaccctcctcagcctccagaagtgctgggattacaggcatgagacaccaagtccagccataaggttcttattctatatatacatgaaatgatatcacttgaaggtagactgtgataagttaaatacgtatattttttaaatcttcaaacaaccactaaaataaaagaacaaagagttacaactaaaaaaaaaaaaaaaaaaactacgtagggggggacggcgtacccaattacgccc

SEQ ID NO: 143 - DNA, 707 bp, Homo sapiens
  misc_feature (562)..(562): n equals a,t,g, or c
  misc_feature (570)..(570): n equals a,t,g, or c
gggtcgacccacgcgtccgcccacgcgtccggtttctacaacccttaggaacatcagaatcatgtgtgtgtgggtgcttattaaataaamsagttcctggagctcactcccagtgactgccagtctgatgattaggggctcagctaggacctaggtttgcgaaagctcccagctgatctcatgcagccagcctggctctggctctggckctgggagctgggttgggaactagtctttggtgctattctgctgawacttcaagatgggctctttgactccgtcttgtattgtcakcacttgtattcaggtctgttcttcccctggattgtaaactccttgatgtctgggtcatctcagctcatgagctgagcttwcagtgggtgctcagtggaacagatgctgaatggagtcaggctgtagggaggccagcgtgtgttggtaagtgagagacaaaaatcattttaaaaagaatctttttgcccttcagttgtgtttgccatgagttaatgtgatttactctagtggaagccagtgcagcttaagtggaggtcttgccctgaantggagccnggttatggatcagcagagctgccaaaagcgttttgggggaaatgtttctgtgtcaccctcagttgattgaactcaagttttcactcccgtttaacaccacgtgggggccattctgacttctgcggagtgggtatgat

SEQ ID NO: 144 - DNA, 2648 bp, Homo sapiens
ggcacgagcttgtaggtactcattgaggtttattgtgtaagatgaatgaatgttgcaaattcctaaacatgtgattcagatgcccaatcttactctgttactttatgaaaattttttaaagctatatgatgttatatcaaaatatgttgttatactttaggataatcggtgtgttagccctgaatttcagcataagtcccatttttttccatgggagtctaggaaagctatatgtttattcagcagcaaaatacagtttggaacttaaataaactattgatcaatttctggtcttatgctagaaggaataaagcatcaagaaaaagaaaagatttgctgtcaagaccaggaaaatttgacaatagagtattagaatgcaggaaatgaggggaagtggaaaggcagcaagtaggagagaaaaagtgcagggacagtagaaagtgaatgtaggagctttctgacccatgcacttcaggaacgcaattcatccctaaaatgctgtttgctgtcttaggttgcaagtaaccaaattaaaaccagtttgaaagtagagtgagacagctgtcatcataagagtcatttgatctgtttaaaggtggctgcttgtatgcagggaccaacagtcatgtccagggcagcagctggtgcacacttcaagcacagaccataagagctaccccaggcagcacctgctaccaatagtgcaaacaactcagagagacctcgttggcataagggaatactctctcctttctgagtaaagagcaagtagaactaaaggtttcacattttaaacatactttacattcctcctcttctggggctcaagcctacttttgggccaaagcggatgttatatctgacatagagtcctcggagcagcagttgttcctgaaagttcctttttgcatctttgtgcctcatgcagtggcttacaggtcaaccagacttctcccctgacttttgatgtgtaagagcttgtgtttcaaatgggtttggttttcttaatgtcaccctaggttggtggaaaggagagtaaatggaaatggggggagcagggtcccctggggaggtttaaacagatggaagtcaattgtctcttgagaatagaggaggctattgagttttcattccacactctgctcctgttctgtcagcaaagaacaaggactactctccagcaattgctttccactggactcccccaccccggctcccacaaaaacctagggatcaacttagttcactccaaattagaaaatttaatagtcatttgtttcttcttgtccacagggagaaccattttctttccttctttcaaaattgcccaggtcttgtgaagggttattaacaccagaaagaaatacattttaataagcttaaatctcatttctacatgaaaccatcagattttagtactgcaatattttgatccctctgtcttttaggctctgacaccaaaattgccataatgaaggtgtttcacttcttctcatttatttttatgggatcttttattcccaaatgccttttcatcccagccaaagggagaaatgttgatagatctgccatcaagaaggttccaaagctggcctgtcaggttttctgtttccttgtttattatctttgaacttttgttttaaatgttttaaacacttatttaccatgtaactaaatgcctgatagcattgaaagtactttatgggttttaatttatttaatgctcatgaaaccctatgaggtaggtactgatattatttttattttactgatgaggaaagtgaagcaaagagaagtgaaatgaaaggtagtgagtgatgggaccagggtttggacatgggcagtctggctctaaaatgtatgcttttaactactatgtaatgctgcctcaccaacaacttgtctcacaaattgatattctggatcagaggatgtcgactggcctgcaaatgtattttgtatggctcatacacagttcagaagttttaaaaatttacatagaaatctgcatttcctgacttcttttgaaaatgggaataccaaacatcattaggcttgaattcccaatacggcaacaacagctgagcaacaagcagctgtttagactaggcaccttccgttcattccagcccacaatgcagatcatagtatcgacttaaatttcctgcctgccttagagaagcttctgagcttgtgacctctattctagctgctctatgaatggacgctgccccagtacagcgaggacctgctgcaaaatgcatttcttagtcttcaatacttattcctccttgtaactggatttctggtaagttatgtctcatggtggatctgccccaaagatggagactgaatggcagtgagtcactcgccctggcctccattgttctggagaaggttccagccacatggttgatgtcagctggttttccagagccagagctgggttgcaggacagacacacctgcatctaatagtgaaaggcaaagttgaaaggccaagaccagcctgaggtctgagggaccaagggcttcacagaggccagaagttcagaggtggacataaaaggtgttaggagaataaggaagtgaaaagaacatagtacagtgtatcagaggaggagctccaggctggcaaatatcactccc

SEQ ID NO: 145 - DNA, 566 bp, Homo sapiens
  misc_feature (1)..(1): n equals a,t,g, or c
ntcttgtgccaggcactgggatatggtgccgaattggatacaagggagatgggacgtcctcctgtgtgtcttgactgtcggtgtgttgccgagcattggtagcagagggggctggtttggcacccaggtaccctgcctcatccccggggccttggccagtctacacagaggaactgccctccagctgagttacccattttccatggcagggaggacagcagaaaggccgtgttccatgactaatcatagcttccatctattgagcatttactgggagctgggcactgtgctaagtgtgaaacgtgtgttgactcatttactacaacaacctggcaaggcaggttcttccgttagcccctgctcaaagctaggggacctggagcacaggcggtcaagtgcttggctcaaggcacacagctcagaagtgcagatcctctgcccctcctggcatcccagtctgggggggtcaggggtgggatctctgcagtcagtgcctgggggctggatgacaagctgcagcctccccgcaaccccacgatttccatagcgcagtggagccagaaaga

SEQ ID NO: 146 - DNA, 1274 bp, Homo sapiens
  misc_feature (722)..(722): n equals a,t,g, or c
agctgagtgtgcgagcgccaggggttccagctgcacgtcccaggctctccagcgcgcggcaggccggggcgggacgaggagagctgcggggacaacgcctgtggctgggtccggagtgcgggtgcggcgcgggacaagcgggcagcatgctcagggcggtcgggagcctactgcgccttggccgcgggctaacagtccgctgcggccccggggcgcctctcgaggccacgcgacggcccgcaccggctcttccgccccggggtctcccctgctactccagcggcggggcccccagcaattctgggccccaaggtcacggggagattcaccgagtccccacgcagcgcaggccttcgcagttcgacaagaaaatcctgctgtggacagggcgtttcaaatcgatggaggagatcccgcctcggatcccgccagaaatgatagacaccgcaagaaacaaagctcgagtgaaagcttgttacataatgattggactcacaattatcgcctgctttgctgtgatagtgtcagccaaaagggctgtagaacgacatgaatccttaacaagttggaacttggcaaagaaagctaagtgscgtgaagaagctgcattggctgcacaggctaaagctaatgatattctaagtgacaaagtgttcacctgaataccatccctgtcatcagcaacagtagaagatgggaaaaatagaatatttaccaaaatntctgccatggttttattttggtaacaagaagcacaatgtcttttttatttttattttttagtaaacttttactgaagtataccatgcattcaaaaagtggacaaaactgtatacagtctgatagatatttatgtcgtgaacacctgtgtaaccactgccaaagtgaagatgtagaatattggcaacacttcacagcctcattcctgccttttctcagccattacctcccaaacatagcagtttttctgagtttcatcacctttgattcattttgcctgtttttgaactttatataaatggatttatacattatgcacttgtgtgtgtggattatttacctgacagttataaggttaatccacaaattgtgtgtaccattagttcatccattgtcattgctgtattctgttgtataaacataccacaatttattttgatatttggcacagtttctggccactacatataatgctaaaatgagcacattgtatatgtcattaaaatgaggttgaactaaaaaaaaaaaaaaaaaaaaaaaaaaaaaaactcgag

SEQ ID NO: 147 - DNA, 2543 bp, Homo sapiens
  misc_feature (2538)..(2538): n equals a,t,g, or c
ctccgttggaaacttgggctgagtaccgcggcgggcgcgagcraggcgccctagacatcttctccctcccttgcctcagatttattgctaaacatgggtgcatttttggataaacccaaaactgaaaaacataatgctcatggtgctgggaatggtttacgttatggcctgagcagcatgcaaggatggagagtggaaatggaagatgcacacacagctgttgtaggtattcctcacggcttggaagactggtcattttttgcagtttatgatggtcatgctggatcccgagtggcaaattactgctcaacacatttattagaacacatcactactaacgaagactttagggcagctggaaaatcaggatctgctcttgagctttcagtggaaaatgttaagaatggtatcagaactggatttttgaaaattgatgaatacatgcgtaacttttcagacctcagaaacgggatggacaggagtggttcaactgcagtgggagttatgatttcacctaagcatatctactttatcaactgtggtgattcacgtgctgttctgtataggaatggacaagtctgcttttctacccaggatcacaaaccttgcaatccaagggaaaaggagcgaatccaaaatgcaggaggcagcgtgatgatacaacgtgttaatggttcattagcagtatctcgtgctctgggggactatgattacaagtgtgttgatggcaagggcccaacagaacaacttgtttctccagagcctgaggtttatgraattttaagagcagaagaggatgaatttatcatcttggcttgtgatgggatctgggatgttatgagtaatgaggagctctgtgaatatgttaaatctaggcttgaggtatctgatgacctggaaaatgtgtgcaattgggtagtggacacttgtttacacaagggaagtcgagataacatgagtattgtactagtttgcttttcaaatgctcccaaggtctcagatgaagcggtgaaaaaagattcagagttggataagcacttggaatcacgggttgaagagattatggagaagtctggcgaggaaggaatgcctgatcttgcccatgtcatgcgcatcttgtctgcagaaaatatcccaaatttgcctcctgggggaggtcttgctggcaascgtaatgttattgaagctgtttatagtagactgaatccacatagagaaagtgatgggggtgctggagatctagaagacccatggtagccttaaaaaccttctaaaatgcttttrattctgaaaattgggggaaaaaacttttaatcacaattttcttcaatacaaggggaaaatattcttgcggattcccaacgttttgtgatatgagcagaaaatcattagcatttcccatcatttgttcatatttgtgttttctgacagttgccacttgtagcattgcctgtactacagtattttttgccaacctcaggcatactcgttacatctgtattgaactttcggccctagaaaccagtggagttatttcaccacaaatcaacaatgtgcctgaggtgcatgggaaatatagttagctatactctgaaaatacattatgttttttttctttaaacaaaacacacaacatgtaagcatgtaagagtaaagaattgtatgatatgttccttttttcagttcaccaagttggaagccttttgcagctctgtggcttggaatttcatttgagcaatttctataggatatgtatttattattgattgttatttaawwwwwttccamttttacctgtattaccaaactgggttctccaataatgtccaaattgtaatgttgccttgcttcaagataaagtgtatttgggaataatattataaacccttmcaaattttatgcatgtatctactgcatccttcaactctcactagaaaatcttttgaaaccaaatggattaatttatggctatttataatttgctttgacatctcactgttggaaattttttaaagatgagatttgcctttataatgtaaattgtgatttttgttttacatgtgggtttctatagttttaattttttcagcttttaagatacgagttttgtgtaatttggtatttttaatcatttatgttattttaaaagctcagaatatcacattgaaattactataaatacatttaaaattatctattttagatctaaggaaatactacagagatattttcatgggttcagtaacttttcattttataacattgggcacggtacagagtgattgtcacataaggtacttgaagatttattagtttaattctatttttacagtaaccttgaattcttctgagttttgcatgtattaaattcaattaatgctgaacatgaagagtaaagtatttatctgaaagaagtttctgggttaggagaagtaatgaatgtatccatttgtacatggtttacatgttgtggatgctttgtaaacattttcctgtatgtttaaattgtgtttcagcaggatgtagttgcccttgtgnaggtt

SEQ ID NO: 148 - DNA, 741 bp, Homo sapiens
  misc_feature (35)..(35): n equals a,t,g, or c
  misc_feature (39)..(39): n equals a,t,g, or c
aattcggcacgagacccttaggaacacggacgcancgtncggcattgtcatctacgcaggacatgaaaccaaggctctgctgaacaacagtgggccccgctacaagcgcasaagctggagaggcagatgaactgcgacgtgctctggtgtgtcctgctccttgtttgcakgtctctgttttcagcagtcggacatggactgtggatatggcggtatcaagagaagaagtcattattttatgtccccaagtctgatggaagctccttatccccagtcacagctgcagttaactcatttttaacatgatatagttckgcaggttttgatcccatttccttatacgkttccattgaaattgttaaagcatgccaagtgtacttcattaaccaggacatgcagttgtatgacgaagaaacagactcgcagctgcagtgccgagctctgaacatcacggaagacttaggacagatacagtacattttctcagataaaactggcactttgacagagaataagatggttttccgaagatgcactgtgtctggtgtagaatattctcatgatgcaaatgagggtctattaagagatgcgcagtggtccacgcggctggccggctccataagtatctccttctccggcctcttgacaggcccctgctgctttgactcagcaccatgcctgtgcttgaagttctgattaaacggttgttctgataagtaaaaaaaaaaaaaaaaactcgta

SEQ ID NO: 149 - DNA, 1414 bp, Homo sapiens
ggcacgagccttgagctagcatttcattatgaccgtgatttttccccgcaccactttccagccttgtggtccacaattccactgggccttaagtatgtactgaactttcctgcctccctcattttgctctgcttgtgcaattttttccaccctccatctctgtcaaacgtaagccttcctgacctctaagacctacctttgtcatgtacctttaccctcaggcaaggagcaatctcttctcttcctcttctaccttgctgtagcttctccccaaggatttatcacattctgccttgaatcatagggaacagcatgtgtagtggaatgaacacaggcctctgaatccaagatacgagtttaaatcccagctttggaggtggttacttaaagtctcagtgccttcattcttcttcctatataaagtagatattacaatatctaacttacagagtcattgggagctatacatgcagcgattgggtaaagcacctggcacatggcaagcgattagcaaatgctggttacttctacttctttctcttcccttttcccagtctatcataatttccttgagagcaggcaccatgtcttatttacccttgtatttcccacagtacttcccatagtgagttacccttagtaaatactcagtaagttgaattgaatttaaattacctgtaagtcttaaaatgtgggattaaattaagaatatattgtcctggaaatacccaagtgtctattgatggatgaatggataaacaaaatgtggtatacacataatggaatattattcagccttaaaaaggaatgaaattctgacatgtgctacaatatgatgaacctggaagacattatatgtgaaataagccagacagaaaaggacaaatgctgtatgattccacttatgtgaagtacctagagtagtgtaattcatagaaacagaaagtacaggttgacatccaaaatctgaaatgagaaatgctccaaaaactgaaactttttcaatgccgacacgatgctcaaagaaaatgctaattggagcatttcagattttggatttttggatttgggatgctcaactggcataatgtgaatattccaaactctgaaaaaatctgaagtctaaaacacttctggtctcaaggattttggataaaggatactcaatgtgcaacatgtagaatggtggttgcaaggtgggaggagagaatggagagttactgtttaatgatacaatgtttccgtttgggaagatggaaagttttggagatgtgtgatggttatggttgcgcaacaatgggaaggtacttagtactgcttaactgtgcacacttaaaaatggtaaaaatgataaattttgtgtatgtcttaaaacaataaaagaagttttttaaaaaaaaaaaaaaaaaaaaaa

SEQ ID NO: 150 - DNA, 323 bp, Homo sapiens
agcacacacctcctttagttgctcctaaggtcatgttcaacattcgtggagtgcattttctgctcagggagctttcccagacccggaatgtttggtgctcacagacyctggcaaggatcggtattgctgttcctcagttttgcctggggaaatggaggstcagtgacgttcagtgacgtgcccagagtcatgccattggcgggtggcccagkgmtccaggtctccagcacccctcggccccctcctcaccaggtcacatcatctcctggattagaatctgctcacatagtctgtcctgaaaggaaaaaaaaaaaaaaaaaaac

SEQ ID NO: 151 - DNA, 1539 bp, Homo sapiens
cgatggccccgcggccgctctagaaagtcccgttttttttttttttttttttttttttttttttagagtacgttctgcattttatttytgcaggcaacactttgctcaccagcaagaacacagcccraggaagggacccaataacctttcaaaacscaaactgctkcctgcggtgagggcccagggtcctccacggagaggacaggcatcttcctttcccaccaggaaggagtcagcccggagcctctgctatgtgcaaggcggtgtgcaagcaccggctgcrgctytttgctgtctcttctttctctttggggctgggctgggtgtgcgttctggtgctgatgctttggcctgtgaggctgagcttggcacctcgacccgttcaattacagcaacgaagaagccactgctgagtgtggtctcaggggaggcccggaggcagtgctcggcacccgggaacgtgctcaggcctcggtggggccaggcaggcagggcgggagctagcctgaaggcgcccgggttctgctgcagcgcatctcgcaccacgtcttcattctcctcctggcagagggagcacgtggagtagacgagccgctgcagggaagggaaagtgagcgcgtggcacagggctcgctgctggaaccctgccagggcatgcagacgcaccgggctaggtgtgcctgccccgggctcctccagctgtctgctcggcatacccgagccactgcaggaaggatccagcaggayrtagtggacctcaygrtagcgyggatcyragggggagaccgccaggaagtcctcctcagccagytcacagcargagacgccagcccrggccagcagcgtggccatggatgccagccgcttggcatccaggtcaaaggcaaagatcttcccttggttcttcagaagagcagccaagtgactggtcttattgcctggggcggcacaggcatcgatgacatgggagcctggcggggggtccagcagcatggctgggagacagctggccctgtcctgcagaatgaggtgtccggcccggtacagtgggtgttcatgcagatctgtctgggcgggaaacaccagcagctccggcatcaaggggtccaggagaaaatgcttccccttgagggctcgtaagtcatcgaggctggaagcccgaccctgataggagaaaccttgtctcttgaaataatcaactacatcatcggagcaggtcttgagagtgttcacacgcacaaatcgaggcagctgggaggctggaccaggcctggatcccacttccaacaggtcctcattccggctcacaccccgatgaaccttgagccgagccaactcagccttgagcctcgcctggtgccggcccaacagagccttccatcggcccccaccccctcgaaagccctttcccaacaacaactcatacactagcaccttggccaggtgcggccgctctagaggatccctcgaggggcccaagcttacgcgtgcatgcgacgtcatagctctctccctagagtgagtcgaatgaggttcata

SEQ ID NO: 152 - DNA, 805 bp, Homo sapiens
ggcacgaggtccctaattgtcttgtacctagccctagggtgaccagggcaggggaatcatggcgagaagcgtaagggcctgatgaagaaggtgtgctgggtgtgggctctagcccacttggttttgtgtgagaggtggctgacagcaggttgtttgctgtatgtaggagttatccagccctgcaagggcagtccctccagtgtctgcaaagcccgaagatgtctgcatccaaaatacagaataaaaagatatggttactacaagtactcagtaagactgataatctgtcatcatcatcctcatgcccttaaagcagagctaactgatgattaatatatgcttctatgttaacagtcttggactttattaatggtgggtggaagttaacttaatgtatgtatgcaaactaaaaagtggcatccttttcattaatgacccaaccattattcaagagctatgtctagttagggacttcagacttttgaaagaaatgaagaaataatgccagatacatgggctcgcacttggaatcccagctacttgggggaccgaggtgggaggaccgcttgagcccaggagttcgagaccagcctgggcaacatagcgaaaccctgcctcagttttaaaaaagaaaaaaagaagtagtgaagaaattggaaaggattctgagaagaaatatgcaaggtggaaaagagcctagaaagaaaggtgacagatgctgggatttggtcgtcagaagagatatctaggaaatagcatggcagccctcaagtactagctccacttaaaaaaaaaaaaaaaaaaa

SEQ ID NO: 153 - DNA, 773 bp, Homo sapiens
  misc_feature (459)..(459): n equals a,t,g, or c
  misc_feature (503)..(503): n equals a,t,g, or c
cggcacgagcttttgcccataggataagtacaaactagatctggttactgcctgccccaccagcctcagtatctctcacaactaggactaactttttcttctgacaactataaaatatttcccttgccttctcaagtttgctcaaggtcaagttatgccttttgcctggaatgacttgacttctcttttgttttacttagctggctgcttttcatcttgtaggttaggtcaagggactccaggaagtcttccctggacaagtaatgaagagggcataatccaagggccaactcccatgttttggaacctgactccattttcaggcacgtaatattgtcaaattccttttaaaagcacctgtctgtctgttaacgttggtgcagatactgctattcccctcctccataccattgctgatggttactgagggtatgggaagggccgactagtccagctgtncacaaacagcccttaatgtcaaactgaatactgccaacgtagtnccagtttctgtatctaaagactcagcttggagtcacttgtctggactaaaaaagtacccctccttgtctggtttgtgactttctgtactctgatgcccccagctttctgccttctagaaatttgtcagaatttccaaaattcttgggccttccttcttgctctatatatggttttggattcattccttttaaaaaatatttactgtcatttcagtagaattttgacacaataaatataagcacatcaaaaaaaaaaaaaaaaaactcgga

SEQ ID NO: 154 - DNA, 1388 bp, Homo sapiens
ggcacgaggtaagttgcaaggtacacccacgggtgatttatcactcttacaaagatgataactaatgaagaccgcatctagaatgctcttactggagatggtttacagagcatttttaatcatcatacttagatttatattaatatttcttttcaaactaaattattccaaactgtgccctgagataccatttggcctcaagttcttttctttcgtctgtattaaggtgcaaataaaaaagactagtaggaaaagaaggccttatttatgaaggttgtctatagctctgagcttggtagctacataaaatgagtaataacctaaataagtaaaactaatgaagatctaactagattactttgcttaatattaacattttacccgccccccgccgtgaaacatttggcagatgttctgcaggactcatgaggacattggtggctacagctgcttctggcactgcccccccaaccccccagtgaggtgaacttctttacacatccagcaagctttagttatcttcttctcccatttgagataactgtggctacaagaatctcagttaaatcagatgtttaaattaggtgccaaaaaatcttacagacactgaactaatacttaaatcaaggaacacttcagttctccataaaatctggtgccattttccaaagaaacagaggatctttgtttcacacccgtggtactggaattgcaacagtgaggcattctagctctcacatgccaatgcgagtggcattcattcttgctcactcatttctgcttctcattgtcacacttggaggctctttgggggtatgtttcagttgatctgagaaactgggtgttaccaatttactagagagtttcttaaaatgtatctgaaacaaactattaatgggcattctgtggtggtaaaaccaggcaacgcctccctacactatctgtcctttcagagctaagaatctgttattttgaattgttcacgaagagtgattctgactctgcttcagtgcacactttacaaaccatcgagcctcatcaaaggagtgagttgagctgaggaattagagtaaagaatacaggtatagtgccgggcgtggtgctcacgcctgtaatcccaacattttgggaggacaaggagggtggatcacctgaggtcaggagttcgagaccagcctgaccaacatggagaaaccctgtctttactaaaaatacaaaattagctggacgtggtggcacatgcctgtgatcacagctactcaggaggctgaggcaggagaatcgcttgaacccaggaggcggaggttgtggtgagccgagatcacgtcactgcactccagcctgggcaacaagagtgaaattccatctcaaaaaaaaaaaaaaaaaaa

SEQ ID NO: 155 - DNA, 433 bp, Homo sapiens
  misc_feature (424)..(424): n equals a,t,g, or c
  misc_feature (430)..(431): n equals a,t,g, or c
cggccgctctagaactagtggatcccccgggctgcaggaattcggcacgaggcgggaaggcttattccaaggtaagaggggctgtgtgaaggggcagtgggatggaatggggggtggcatgggacaggcacaagggaagcctccagccccttttctgccacaagcaagaggcactcagccctacctgagatgtgttattttttagaaatatctttattgatggtctttgcactcaatataaaggcagcatatggttgttgcaatataaatggtacagaagtccacagagcaaaagggccagtttctgtcccctttcctctctccaggcctctttctgggaccccattattggatagattaagacctttccagaccttgtaaaaaaaaaaaaaaaaaactcggggggggscccggaaaccaattngccccnnaa

SEQ ID NO: 156 - DNA, 795 bp, Homo sapiens
  misc_feature (1)..(1): n equals a,t,g, or c
ngaactagtatattcaccgtctatgaggccgcctcacaggaaggctgggtgttcctcatgtacagagcaattgacagctttccccgttggcgttcctacttctatttcatcactctcattttcttcctcgcctggcttgtgaagaacgtgtttattgctgttatcattgaaacatttgcagaaatcagagtacagtttcaacaaatgtggggatcgagaagcagcactacctcaacagccaccacccagatgtttcatgaagatgctgctggaggttggcagctggtagctgtggatgtcaacaagccccagggacgcgccccagcctgcctccaggtgcagtacaatgacatttttaaaaatcgcccagcaaaggtctttgaattttatttcatccaagaaaatccacagctctttaagctctagatttgtccaaatttaaaatcctgaagttagagatggtatttcactccttcctctattcccaggacctagctttttttttttaacatacacaatagggatttgataagtttctgatggctgcaggcatgtaagagcatttcagtggtattgaatcaatgaagaattttgttgacatgtgaaatcttataaaaatattctttaccgaaggactgagttatgtggcagtgggtacattcattgtttcatccctcccctagtaactgggataaatatgttgatacatagtctctctgtttttctgcatttggaagctttcagaggaacataatgtagaggtgtttctttagcaaagtgcactgatagcaaaca

SEQ ID NO: 157 - DNA, 1443 bp, Homo sapiens
ggaaccattggcctatattgggttggatctattattatgagtgttgttgtttttgtgccaggaaacattgtagggaagtatggaacacgaatttgccctgcttttttcttaagcataccatatacttgtcttcctgtctgggctggtttcagaatctataatcagccatcagaaaattataattacccctcaaaggttattcaagaagcccaagcgaaagacctgctgagaagaccatttgatttaatgttggttgtgtgtctcctcctggcaactggattttgcctgttcagaggtttgattgctttggattgcccatctgagctctgccgattatatacgcaatttcaagagccctatctaaaggatcctgctgcttatcctaaaattcagatgctggcatatatgttctattctgttccttactttgtgactgcactgtatggcttagtggttcctggatgttcctggatgcctgacatcacattgatacatgctggaggtctggctcaggctcagttttctcacattggtgcatctcttcatgctagaactgcttatgtctacagagtccctgaagaagcaaaaatcctttttttagcattaaacatagcatatggagttcttcctcagctcttggcctatcgttgtatctacaaaccagagttcttcataaaaacaaaggcagaagaaaaagtggaataaaaatattacttcatgttcctcctttctaaattactaacttttgttatactggtactgatattttgtcccatttcactctcttctcatacgtgagtacttaagaatatgtacattcttgctctgcactgtatgtgtgagctatatggtattgtgtaaattttttttgaaggaaaatggaaattcttgagaaacagtttgtttaaagaaatatattcaaaatcatttgtgaataaacttgatcatccatctcaatattgtttgacatataaaataattataagtgtaaaaaattacaatttagtgccaacagtagtgagcatgaaatgaaactattcaaaagagaatatggcctgtgcatattaaaaaattcaaaacagtgaatgcagactggaggagtaacttttgcaaataagatgaatatgcttcattattaaactcaatataaaaggcaaatcatcagaatatttttaaatgttgtttgaaaaatgttttcccaaggaaagtttattatttgctgctgtttcaagaaaattacttttactaaatttttttgtgtgaatttaaacagctaaatagggatcagtaactttatctctatccttaatgaacatttgttttattggtggctggaaatatttctattgtatttctgtgtatatttttaataaaattatttttggcctcttaaaaaaaaaaaaaaaaaaaaaaaaaaaaaaaaaaaaaaaaaaaaaactcgag

SEQ ID NO: 158 - DNA, 809 bp, Homo sapiens
ggcacgaggagaatcatgggcctctggctgggcatgctggcctgtgtcttcctggcaactgctgcctttgttgcttatactgcccggctggactggaagcttgctgcagaggaggctaagaaacattcaggccggcagcagcagcagagagcagagagcactgcaaccagacctgggcctgagaaagcagtcctatcttcagtggctacaggcagttcccctggcattaccttgacaacgtattcaaggtctgagtgccacgtggacttcttcaggactccagaggaggcccacgccctttcagctcctaccagcagactatcagtgaaacagctggtcatccgccgtggggctgctctgggggcggcgtcagccacactgatggtggggctcacggtcaggatcctagccaccaggcactagcaaagaagcttggaaatagaaagccaggagtggctgtccccagtatgcaaacacaccacggtctgccctgcaaaaacaccaatggggtctagtgcaggtggacactttgaaccactcctcaaaaaaagaactttggctgattccttgtggtgacactcagaggggtctgaacagacttgacaattctgttctggtcaagctggagttttcttctgtgacttggactgctctacagaagacatcagccaactgcacgagtcagagtccagggattgtcactattattaataatgtaaatggcttcaaatgggacactgcagataaaatcacaaaaaccactgttatattaaagattacacatttcctggaaaaaaaaaaaaaaaaaa

SEQ ID NO: 159 - DNA, 868 bp, Homo sapiens
  misc_feature (3)..(3): n equals a,t,g, or c
ggncacgaggttaactgtkacaccatgattactgaggtaagacatgtccctccagtcccgtggcagcaactgattttgcctatgcaaagccgtgctattcttctgctggtggttagcctttgctttagaggacttccctcctattccatgtgcttggaagtgatgagcagagggaagactttcaacgtaaatcctggtggtccatctggaccactgccaccaaccaaggtggtcacatggccagacagaactaatctgtgtcctaccccagaactgatgtagaaatgtccaaagtttaaagccttggctgggcgcagtggctcgcatgtgtagtcctagcactttgggtggccaaagtgggtasagcacttgagcccaggagttcaagactaaaacctgggcaacagcgagaccctgtctctacaaaaagtttaaaaattagctgagggtggtggtgtgcacctgtagtcgtagtaytcaggaggctgaaatgggaagatcacttgagcccagaaatttgaggctgcagtgaactaaaaaggtgctatggtaytctagcytctagtctgggtgacaaagcaagaaccctgtctcaaaaatcaattaaaaaacaggccaggtgttggggcttgtgcctgtaatcccaacactttgggaggccatggcgggtggatcacctgaagtcaggagttcgagaccagcctggccaacatggtgaaaccctgtatctctactaaaaatacaaaagttagccaggcatgttggtgcatgcctatggtcccagctactcgggaggctgaggaaggagaactgcttgaactcaggaggcggaggtgcagtgagctggaattgtgtcactgcactccag

SEQ ID NO: 160 - DNA, 1986 bp, Homo sapiens
ggcacgagggaaaactgttttatttgcatttgaagaagctattggatacatgtgctgcccttttgttctggacaaagatggagtcagtgccgctgtcataagtgcagagttggctagcttcctagcaaccaagaatttgtctttgtctcagcaactaaaggccatttatgtggagtatggctaccatattactaaagcttcctattttatctgccatgatcaagaaaccattaagaaattatttgaaaacctcagaaactacgatggaaaaaataattatccaaaagcttgtggcaaatttgaaatttctgccattagggaccttacaactggctatgatgatagccaacctgataaaaaagctgttcttcccactagtaaaagcagccaaatgatcaccttcacctttgctaatggaggcgtggccaccatgcgcaccagtgggacagagcccaaaatcaagtactatgcagagctgtgtgccccacctgggaacagtgatcctgagcagctgaagaaggaactgaatgaactggtcagtgctattgaagaacattttttccagccacagaagtacaatctgcagccaaaagcagactaaaatagtccagccttgggtatacttgcatttacctacaattaagctgggtttaacttgttaagcaatatttttaagggccaaatgattcaaaacatcacaggtatttatgtgttttacaaagacctacattcctcattgtttcatgtttgacctttaaggtgaaaaaagaaaatggccaaacccaacaaactaacattcctactaaaaagttgagcttggacatattttgaatttttgtaagtgaagatttttaaactgactaacttaaaaaaatagattgtaattgatgtgccttaatttgcataaatcataaatgtatgtcctctctgtaattgttttaatgtgtgcttgaaatatccagaaaacctatggagttagtaaattctgggctgtcatatgtaggatagccactttttaggtatatgtacatttatatttctatcaattccttagaaagtaaaataaatgaatagatcaaatgttgtgttcatgtttggggaaaatataatttgcagaaacctatgaagtagagcaaagatgctttaaaaagataagtttttttgaactaaattttttttagttctaataatgcacataggatattagtacatcgtacacgtgctaggaaaaaacagcttcagtgtctttgtttaatgtgttgaaactcatctttttaaatcttgaaaaaccaattgtttacttgaaacttgaaagtagcatatttttctgttttttggttgtttgttcatttgtattagcacaatttaatgtaattcctggtttggaggcagcaagacctatgagcaagaactatttacttgaccctcgtttttttctcttgttcttgtgtggtctgaaatctaaaactagactttattatgatagatttcctataagccaatttctaataacaaatagatttattatttaatctgtaccttctatcttctcataattcgtggtcttacagccttccaaaataactccagttgggcacccatgagctaggatcaaactttctttatatactttatatattttacattatttctgatttttaaagcaaatgattgccattatgattacactcaacctaaatagttatgaacagtttcagaacaatgaaaaattacaatactatgtgatagtattgtaactatttttctattttagtcatatgtcgcttatatcctaccagaactcttaaatctataatattcgatatattctacaaactgctttattgtagaagccatatttatgtttattttataatgttttctagtgtcaaactgtactgtggagaaaagaaatgttagatctgtgttctgtctgcattttttttgagtacatacccttcaccctcaaaaaaaaaaaaaaaaaaa

SEQ ID NO: 161 - DNA, 657 bp, Homo sapiens
  misc_feature (12)..(12): n equals a,t,g, or c
cccccccggggntgcaggaattcggcacarattttacatgcttttaagttaatgttggaaaactaatcacaagcagtttctaaaccaaaaaatgacatgttgtaaaaggacaataaacgttgggtcaaaatggagcctgagtcctgggccctgtgcctgcttcttttcctgggaacagccttgggctacccaccactcccaaggcattcttccaaatgtgaaatcctggaagtaagattgcaccttcttcctctcctgatcaacatcggtatgatgtctcctgttgcctcaccctttgtctgcagtatcactggataggactggtggaaagggagcagcctgacagagctccaaatgtggagaatatggcatccctccacctatatttgatgtggacggtaaggctaggcctgcaggatcccttatcctgaccaaagactgtgttggggtgccatttgaaaatcgcagggttgcaaaagaatacaatcttacttgcaggtggatattctctatactctcttttaatgcatctaaaaatcccaaacatcccctggttggtgatcacttacagttgtgtccacctttattttatgtactttgattaaaaaaaaaaaactttttgttaatataaaaaaaaaaaaaaaaaaaaaaaaaaaa

SEQ ID NO: 162 - DNA, 2425 bp, Homo sapiens
cgctgccgatcgccgggaggacccccgcctcgccgaagacgggcggggcaagccgagcctcacggggtccccggagctgggccgggcctccagatggagaaggcgcaacggggagttcttgagtaagccagagcggtgtccagcgcggtgtagccgcagccgccgctgtcaggcgcagcaacggacaaccccgtagaagtcggtcggcaggtcctctccaacccgccgctaccgcgccgctgtgggagagaccccagcaggagcccaagggcagctacgggggcgcgaaggccgctggcgccgcctcggccagcccttcccgcgcggttccactgccttaaggatgacagtcgtagggaaccctcgaagttggagctgccagtggttgccaatcctgatactgttgctgggcacaggccatgggccaggggtggaaggcgtgacacactacaaggccggcgaccctgttattctgtatgtcaacaaagtgggaccctaccataaccctcaggaaacttaccactactatcagcttccagtctgctgccctgagaagatacgtcacaaaagccttagcctgggtgaagtgctggatggggaccgaatggctgagtctttgtatgagatccgctttcgggaaaacgtggagaagagaattctgtgccacatgcagctcagttctgcacaggtggagcagctgcgccaggccattgaagaactgtactactttgaatttgtggtagatgacttgccaatccggggctttgtgggctacatggaggagagtggtttcctgccacacagccacaagataggactctggacccatttggacttccacctagaattccatggagaccgaattatatttgccaatgtttcagtgcgggacgtcaagccccacagcttggatgggttacgacctgacgagttcctaggccttacccacacttatagcgtgcgctggtctgagacttcagtggagcgtcggagtgacaggcgccgtggtgacgatggtggtttctttcctcgaacactggaaatccattggttgtccatcatcaactccatggtgcttgtgtttttactggtgggttttgtggctgtcattctaatgcgtgtgcttcggaatgacctggctcggtacaacttagatgaggagaccacctctgcaggttctggtgatgactttgaccagggtgacaatggctggaaaattatccatacagatgtcttccgcttccccccataccgtggtctgctctgtgctgtgcttggcgtgggtgcccagttcctggcccttggcactggcattattgtcatggcactgctgggcatgttcaatgtgcaccgtcatggggccattaactcagcagccatcttgttgtatgccctgacctgctgcatctctggctacgtgtccagccacttctaccggcagattggaggcgagcgttgggtgtggaacatcattctcaccaccagtctcttctctgtgcctttcttcctgacgtggagtgtggtgaactcagtgcattgggccaatggttcgacacaggctctgccagccacaaccatcctgctgcttctgacggtttggctgctggtgggctttcccctcactgtcattggaggcatctttgggaagaacaacgccagcccctttgatgcaccctgtcgcaccaagaacatcgcccgggagattccaccccagccctggtacaagtctactgtcatccacatgactgttggaggcttcctgcctttcagtgccatctctgtggagctgtactacatctttgccacagtatggggtcgggagcagtacactttgtacggcatcctcttctttgtcttcgccatcctgctgagtgtgggggcttgcatctccattgcactcacctacttccagttgtctggggaggattaccgctggtggtggcgatctgtgctgagtgttggctccaccggcctcttcatcttcctctactcagttttctattatgcccggcgctccaacatgtctggggcagtacagacagtagagttcttcggctactccttactcactggttatgtcttcttcctcatgctgggcaccatctcctttttttcttccctaaagttcatccggtatatctatgttaacctcaagatggactgagttctgtatggcagaactattgctgttctctccctttcttcatgccctgttgaactctcctaccagcttctcttctgattgactgaattgtgtgatggcattgttgccttcccttttgccctttgggcattccttccccagagagggcctggaaattataaatctctatcacataaggattatatatttgaactttttaagttgcctttagttttggtcctgatttttctttttacaattaccaaaataaaatttattaag

SEQ ID NO: 163 - DNA, 1174 bp, Homo sapiens
ggaattcggcacgagctggctgcagggtctctggggagagaaggggcctcggcttcacaggatggggctgccagtgtcctgggcccctcctgccctctgggttctagggtgctgcgccctgctcctctcgctgtgggcgctgtgcacagcctgccgcaggcccgaggacgctgtagcccccaggaagagggcgcggaggcagcgggcgaggctgcagggcagtgcgacggcggcggaagcgtccctactgaggcggacccacctctgctccctcagcaagtcggacaccagactgcacgagctgcaccggggcccgcgcagcagcagggccctgcggcctgccagcatggatctcctgcgcccacactggctggaggtgtccagggacatcaccggaccgcaggcagccccctctgccttcccacaccaggagctgccccgggctctgccggcagctgcagccaccgcagggtgcgctggcctcgaggccacctattccaacgtggggctggcggcccttcccggggtcagcctggcggccagccctgtggtggccgagtatgcccgcgtccagaagcgcaaagggacccatcgcagtccccaagagccacagcaggggaagactgaggtgaccccggccgctcaggtggacgtcctgtactccagggtctgcaagcctaaaaggagggacccaggacccaccacagacccgctggaccccaagggccagggagcgattctggccctggcgggtgacctggcctaccagaccctcccgctcagggccctggatgtggacagcggccccctggaaaacgtgtatgagagcatccgggagctgggggaccctgctggcaggagcagcacgtgcggggctgggacgccccctgcttccagctgccccagcctagggaggggctggagacccctccctgcctccctgccctgaacactcaaggacctgtgctccttcctccagagtgaggcccgtcccccgccccgccccgcctcacagctgacagcgccagtcccaggtccccgggccgccagcccgtgaggtccgtgaggtcctggccgctctgacagccgcggcctccccgggctccagagaaggcccgcgtctaaataaagcgccagcgcaggatgaaagcgaaaaaaaaaaaaaaaaaaaaaa

SEQ ID NO: 164 - DNA, 1112 bp, Homo sapiens
gccggaggaagagcgtctgcaaaactgggttcctagaagtatagacggacttagcttttwgtagaatttggtgaggagcagcgcctcgtgagagcagaatggcctggcgtggccagtgcttcccggcagcacgcagctctgcggcctccagaattcccctgttctgagcttgatgcccctagcctgtcccctacctacttcctcccctcctctctagccctctcacaggggtgattgctacctctctgttttcttgggcctaggcaagttttagaggagttcccaagcattgttatgaggccagtgtgctcgctgggctgggcgggatggcctgggcttgtgtgtggcctgagggctctcctggggccttctcttttcccagtcacctttggagccacagaagcagtgcactcattggatgtctgttcttaacacagcttctctttctacattaaaaaaaatcattattgcattttggaaagcagtgctcatcaaaagcaacttttaaaacctattttattgttcctttaaatgttctctcccgctgaaactgccctggagaggctatctgctgctcttccatttacccacatcaggttattctccatgtcactcagtggagatgactccagatgtgtttaaagmctggacaattcacctatactgtgtaggaaattacctccttaattacctggtmgaattgtcagcagacatgttcatccgatgatagtactgcagttttctattaataatttgcagacttttatctaacctgcactcatgtacagattattaaaagttttaaaatgtaactgatcagtattgatcaatcattgtcttgatttttttttacagcgtatatttctaatcatattttttaaagccaagagaactggttgaatgaatgtttattttcctgaaggtatttttaagataaagcttcctaatggcgtgtaaactttgcatatgtatgtagtttgatacatattgtcacatttgaaaatcttgtgggttgtaactggttttatacaaaatatcgaatagtggaaattgtataattacaatcatgtaattaaaagtattaacccaaaaaaaaaaaaaaaaaaytcgag

SEQ ID NO: 165 - DNA, 1097 bp, Homo sapiens
ccacgcgtccgcccacgcgtccggaagttgcctcctaggcagaaatcaagaaatccaactataacataggttagagtccattttggtttttatatccttccacagaggaaagaggaggaagaatctggagatgcgtttttggtttttggttttttgtttttttttttttccagaggctcatgtatatcctacatcatggtcagtttcagagcagggctgtgccaccatctcagtgactcctggaatactaaattggatctttgtagaggaagaaaataacacagttctagattttccctagctgttaattagttttatggcataattaaaatagctcaggagtaaaaacaaagtccagccttaacagcctgttaagtcttcttttcttatcttgaaaagaggtaagataatgaagtttaaacagttgaagaagttaaccggaaaggaattaacatttcaaggccttgccgcttcttcctcctcttgtgatatgaaccagaattgagggaaaataggcaggagggaacccacactgaattttccagactctactgctgaaagacattgtatatttttattgtaatcatatgtgatgcaagataatattgctcatatctgaatcccaaaagaaaagaagatgtttgtctgagcatcccatgaggtaagcagccccatggaaggaccagctgcatccagcaaagggctccaggtccctgacgtagttgacggtgatggcagaagtaaatctttgtattcttgcagagactttgtttctgaaagaggccaaaagtcatttcaaactgaatctgacggataagataggggccatagctgagaaaaataagtagcgaagccgatctaaaccaaggtgtaactgtgaaatagtaaccatcttctttgcacgtttcaaaattggccctggacgccatcgcaagaggaaaattccaaagctgtgcagcagcggcagtaccattggaagagtttacagcctaccaggactacttagaaggggatcatgtttatttggatatataacccctgattggtttgttttaaaaataaacgttattatgttagtgtcaaaaaaaaaaaaaaaa

SEQ ID NO: 166 - DNA, 1238 bp, Homo sapiens
ccacgcgtccgcccacgcgtccgcccacgcgtccggctgcggcgcgatggcggcggggctggcgcggctcctgttgctcctcgggctctcggccggcgggcccgcgccggcaggtgcagcgaagatgaaggtggtggaggagcccaacgcgtttggggtgaacaacccgttcttgcctcaggccagtcgcctccaggccaagagggatccttcacccgtgtctggacccgtgcatctcttccgactctcgggcaagtgcttcagcctggtggagtccacgtacaagtatgagttctgcccgttccacaacgtgacccagcacgagcagaccttccgctggaacgcctacagtgggatcctcggcatctggcacgagtgggagatcgccaacaacaccttcacgggcatgtggatgagggacggtgacgcctgccgttcccggagccggcagagcaaggtggagctggcgtgtggaaaaagcaaccggctggcccatgtgtccgagccgagcacctgcgtctacgcgctgacgttcgagacccccctcgtctgccacccccacgccttgctagtgtacccaaccctgccagaggccctgcagcggcagtgggaccaggtagagcaggacctggccgatgagctgatcaccccccagggccatgagaagttgctgaggacactttttgaggatgctggctacttaaagaccccagaagaaaatgaacccacccagctggagggaggtcctgacagcttggggtttgagaccctggaaaactgcaggaaggctcataaagaactctcaaaggagatcaaaaggctgaaaggtttgctcacccagcacggcatcccctacacgaggcccacagaaacttccaacttggagcacttgggccacgagacgcccagagccaagtctccagagcagctgcggggtgacccaggactgcgtgggagtttgtgaccttgtggtgggagagcagaggtggacgcggccgagagccctacagagaagctggctggtaggacccgcagggaccagctgaccaggcttgtgctcagagaagcagacaaaacaaagattcaaggttttaattaattcccatactgataaaaataactccatgaattctgtaaaccattgcataaatgctatagtgtaaaaaaatttaaacaagtgttaactttaaacagttcgctacaagtaaatgattataaatactaaaaaaaaaaaaaaa

SEQ ID NO: 167 - DNA, 1304 bp, Homo sapiens
  misc_feature (1)..(1): n equals a,t,g, or c
nctggtaccaaagcaagtttttcactgagctctcatgaaagatcctcagtctcttgtggatttagaatcctgcagcagcccaccatctaagagcaagagccaaagatgtttgtcttgctctatgttacaagttttgccatttgtgccagtggacaaccccggggtaatcagttgaaaggagagaactactcccccaggtatatctgcagcattcctggcttgcctggacctccagggccccctggagcaaatggttcccctgggccccatggtcgcatcggccttccaggaagagatggtagagacggcaggaaaggagagaaaggtgaaaagggaactgcaggtttgagaggtaagactggaccgctaggtcttgccggtgagaaaggggaccaaggagagactgggaagaaaggacccataggaccagagggagagaaaggagaagtaggtccaattggtcctcctggaccaaagggagacagaggagaacaaggggacccggggctgcctggagtttgcagatgtggaagcatcgtgctcaaatccgccttttctgttggcatcacaaccagctacccagaagaaagactacctattatatttaacaaggtcctcttcaacgagggagagcactacaaccctgccacagggaagttcatctgtgctttcccagggatctattacttttcttatgatatcacattggctaataagcatctggcaatcggactggtacacaatgggcaataccggataaagaccttcgacgccaacacaggaaaccatgatgtggcttcggggtccacagtcatctatctgcagccagaagatgaagtctggctggagattttcttcacagaccagaatggcctcttctcagacccaggttgggcagacagcttattctccgggtttctcttatacgttgacacagattacctagattccatatcagaagatgatgaattgtgatcaggaccaagatccctgtggtaaacactctgattgaatctggggttccagaaggtggaacaagcaggaatgggatccaaagagactcccactcagattctaaagcatttaaagacaattctagcagaatttatcaaaacaagatgaaacacagaaaagttgaaaccacaacaaaatgaattctattaaagaatagccccagatataaattctcttgaaagcaatgttcataaatatttaagcaaattaaagacaatgttaacaaattttctattaaatgccctgagtgataaaaccagttggcaataatattgccttattaaatcttc

SEQ ID NO: 168 - DNA, 1147 bp, Homo sapiens
ggcacgagctaggagcctcctaatgcagtcttctgcacagtcctggggactgactgactgaatcacacctctggggctgggggctgctgacatgtgtgcctttccttggctgcttcttctcctgctgctccaggagggcagccaaaggagactctggagatggtgtggatccgaggaagtggttgcggtccttcaggagtccatcagcctccccctggaaataccaccagatgaagaggttgagaacatcatctggtcctctcacaaaagtcttgccactgtggtgccagggaaagagggacatccagctaccatcatggtgaccaatccacactaccagggccaagtgagcttcctggaccccagctattccctgcatatcagcaatctgagctgggaggattcagggcttttaccaagctcaagtcaacctgagaacatcccagatctctaccatgcagcagtacaatctatgtgtctaccgatggctgtcagagccccagatcactgtgaactttgagagttctggggaaggtgcctgcagtatgtccctggtgtgctctgtggagaaggcaggcatggatatgacctacagctggctctcccggggggatagcacttatacattccatgaaggccctgtcctcagcacatcctggaggccgggggacagtgccctctcctacacctgcagagccaacaaccccatcagcaacgtcagttcttgccccatccctgatgggcccttctatgcagatcctaactatgcttctgagaagccttcaacagccttctgcctcctggccaagggattgctcatcttcttgctcttggtaattctggccatgggactctgggtcatccgagtccagaaaagacacaaaatgccaaggatgaagaaactcatgagaaacagaatgaaattgaggaaggaggcaaagcctggctccagccctgcctgactgctccttgggaaccccagtcctgagcttggtttcttcccagcacccagagaatccttcctcagctctcttctttccaggggaaggaggtgctcaggggtgggtatccagagagccatacttctgagggaagactggctggcaataaagtcaaattaagtgaccaccaaaaaaaaaaaaaaaaa

SEQ ID NO: 169 - DNA, 563 bp, Homo sapiens
ggcacgagtacagctttgccattcatagatacatacccttcatcctgtggcccatttctgacctcttcaacgacctgattgcttgtgcgttccttgtgggagccgtggtctttgctgtgagaagtcggcgatccatgaatctccactacttacttgctgtgatccttattggtgcggctggagtttttgcttttatcgatgtgtgtcttcaaagaaaccacttcagaggcaagaaggccaaaaagcatatgctggttcctcctccaggaaaggaaaaaggaccccagcagggcaagggaccagaacccgccaagccaccagaacctggcaagccaccagggccagcaaagggaaagaaatgacttggaggaggctcctggtgtctgaaacggcagtgtattttacagcaatatgtttccactctcttccttgtcttctttctggaatggttttcttttccattttcattaccacctttgcttggaaaagaatggattaatggattctaaaagcctaaaaaaaaaaaaaaaaaaaaaaaaaaaaaaaaaaaaaaaaaaaaaaaa

SEQ ID NO: 170 - DNA, 413 bp, Homo sapiens
  misc_feature (407)..(409): n equals a,t,g, or c
gaattcggcacgagtgcagcttcattttgggctgccttagccatgaagctccttttgctgactttgactgtgctgctgctcttatcccagctgactccaggtggcacccaaagatgctggaatctttatggcaaatgccgttacagatgctccaagaaggaaagagtctatgtttactgcataaataataaaatgtgctgcgtgaagcccaagtaccagccaaaagaaaggtggtggccattttaactgctttgaagcctgaagccatgaaaatgcagatgaagctcccagtggattcccacactccatcaataaacacctctggctgaaaaaaaaaaaaaaraaaaaaaararaaaaaaaagaaaaaaaactcaagggggggcccggtacccattcgccctatgtnnntcgt

SEQ ID NO: 171 - DNA, 1075 bp, Homo sapiens
  misc_feature (79)..(79): n equals a,t,g, or c
  misc_feature (604)..(604): n equals a,t,g, or c
  misc_feature (656)..(656): n equals a,t,g, or c
gtgtcgcagctctcttcgacgtacctgtcctcaggagccgcggcggcgactgcgcctcggacggccgtcggggccgagnaaccatgagccccaggggcacgggctgctccgccgggctgctgatgactgtcggctggctgcttctggcgggcctccagtccgcgcgcgggaccaacgtcaccgctgccgtccaggatgccggcctggcccacgaaggcgagggcgaggaggagaccgaaaacaacgacagcgagaccgcggagaactacgctccgcctgaaaccgaggatgtttcaaataggaatgtcgtcaaagaagtagaattcggaatgtgcaccgttacatgtggtattggtgttagagaagttatattaacaaatggatgccctggtggtgaatmcaagtgtgttgtacgggtaraagaatgccgtggaccaacagattgtggctggggtaaaccaatttcagaaagtcttgaaagtgttagattggcatgtattcacacatctcccttaatcgtttcaatatatgtggaacttytaagacagaccacaatccattatacttgtaaatgattcagcaatcctagaagtacgcaaggaangtcaccccttgctttcgagtgtgacacactggataataatgaaatagtagcnactattaaattcacagtctatacgagcagtgaattgcagatgagaagatcaagcctaccagccactgatgcagccctaatttttgtgctgaccataggagtcattatctgtgtatttataattttcttattgatcttcataatcataaattgggcagcagtcaaggctttctggggggcaaaagcctctacacctgaggtacaatccgagcagagttctgtgagatacaaagattcaacttctcttgaccaattaccaacagaaatgcctggtgaagatgatgctttaagtgaatggaatgaatgatgtttgaatgatatataacaaaccaaaggatattacagaatattagattcattattacaaaaataaaatacacattgaaatactttaaaaaaaaaaaaaaaaaaaaaactcga

SEQ ID NO: 172 - DNA, 1113 bp, Homo sapiens
ggcacgagcggggacggggctaagatgatatctgggcacctcctacaagaaccgactgggtctccagtagtctctgaggagccgctcgaccttctcccgaccctggatctgaggcaggagatgcctcccccgcgggtgttcaagagctttctgagcctgctcttccaggggctgagcgtgttgttatccctggcaggagacgtgctggtcagcatgtacagggaggtctgttccatccgcttcctgttcacggctgtgtcgctgctgagcctctttctgtcagcattctggctggggcttctgtacctggtctctcctttggagaatgaacctaaggagatgctgactctaagtgagtaccacgagcgcgtgcgctcccaggggcagcagctgcagcagctccaggccgagctggataaactccacaaggaggtgtccactgttcgggcagccaacagcgagagagtggccaagctcgtgttccagaggctgaatgaggattttgtgcggaagcccgactatgctttgagctctgtgggagcctccatcgacctgcagaagacatcccacgattacgcagacaggaacactgcctacttctggaatcgcttcagcttctggaactacgcacggccgcccacggttatcctggagccccacgtgttccctgggaattgctgggcttttgaaggcgaccaaggccaggtggtgatccaactgccgggccgagtgcagctgagcgacatcactctgcagcatccaccgcccagcgtggagcacaccggaggagccaacagcgccccccgcgatttcgcggtctttggcctccaggtttatgatgaaactgaagtttccttggggaaattcaccttcgatgttgagaaatcggagattcagactttccacctgcagaatgaccccccagctgcctttcccaaggtgaagatccagattctaagcaactggggccacccccgtttcacgtgcttgtatcgagtccgtgcccacggtgtgcgaacctcagagggggcagagggcagtgcacaggggccccattaaacatgctgatttttggagtaaaaaaaaaaaaaaaaaaaaaaaaaaaaaaaaaaa

SEQ ID NO: 173 - DNA, 738 bp, Homo sapiens
ggtacaggactgagaagcagataacaagagtgacgctcacagggctgggctgacgctaacaggaggcagtgtgtggctcgaagattcttgaacccacagcagcagctgcggccaccccatcctgcccacagctccagccctgagacgacgaggaggagagtcgactttgcctcttgcccaagggaccatgcccaggtgccggtggctctccctgatcctcctcaccattcccctggccctggtggccaggaaagacccaaaaaagaatgagacgggggtgctgaggaaattaaaacccgtcaatgcctcaaatgccaacgtgaagcagtgtctgtggtttgccatgcaagaatacaacaaagagagcgaggacaagtatgtcttcctggtggtcaagacactgcaagcccagcttcaggtcacaaatcttctggaataccttattgatgtagaaattgcccgcagcgattgcagaaagcctttaagcactaatgaaatctgcgccattcaagaaaactccaagctgaaaaggaaattaagctgcagctttttggtaggagcacttccctggaatggtgaattcactgtgatggagaaaaagtgtgaagatgcttaatggtgttttgaggcatccctccaacctctgtgactactttatccatgaaaatgaagcaatggcaggtgggaggctcttcccaatgtgctttcttcaaaaaaaaaaaaaaaaaaaaaaaaaaa

SEQ ID NO: 174 - DNA, 752 bp, Homo sapiens
gatcaaatcctgaagtggtacatgtcactactgttcatagtctctttgctggaacttggtcctatggccctactggcagagaggaaggctatgaaacccagtctaggcctgcgcctagaagaagaagaagaagaaacaccttttgaagaacagagagcagtctctgtcataccaggrgtacctgtcacatacttgtagaacaaaaataagtaacattttaattattgaaacaatgtaacaactttaaacacagtttcataactaggagtgaatcacccataatctcatacccggaacaaaatatctgttagtatgatgcacctttacatagctgtaatcttaaagggcatgtacttccttctttgctttcctttttttttttcttcatcctttccctctctccctctctccctctctccctttctcccttccttctttcttttcttcctttctttctgattttctaacttccttctttaaacattccttgatcgtctgtgggtctggacagcaacatggagatcaattaggcgcagcattttaaatttgccctcaagaagttccactagtgtaagagtaggcaagtaaccaattattacaatagtgggacaagcgctgtgatagaaataaatacagagtactgtggcagtccttacccagaaaaagatatctagggtagatggtatctgaactgagaattaaagaataaatagaagatagcatggcaaaaaaaaaaaaaaaaaaactcgtag

SEQ ID NO: 175 - DNA, 1748 bp, Homo sapiens
ggcacgagtaaagacaaaataaattcttctgtccacttatttacctaacatacacttgcttccttggaagtcataggcatccacatatcttcagccacaacttggtatttctaatataattcttatttttgaactcctaaactttctggtagaaatcttcagttgaaaatatcctggcaagtaaaattagaaactcccagaaatgtacttatttctattatgttgttttatttctgaacattgtgcccaacattcttttccacatacttgcccaaattggaaaactagggttctaagtttccccctccatccatgcccacatttaattcaccctaataatacctgacatctttcaagttcattttctactatctatccccacgcaggccatatctgggttgaagcttcattatctctatagattaaaaacaaaaacaaaatgcatacaagcaaaacaaataacatacaaacaaaacccacctaactcatctttatgtagtcagtcctccctcaatagtttggccaaacttcctaaaccgaaatctgattgtgactatccccttctaaatgtatttaatcagcataccccttcaataaatccattaaccgttcttgttatccaagacagtttgtcatctgtcttggataacaagttgcagactccatccaatgccattttcccctagaaatatagataatggcactataggaacaatgatctccacatgcctcatgcattggtaatttttttaacctttgctagaaatgttctgctccactctactcatccaccacccattctactccaccttacactacctcttttcccatttagatcttccattctatatctccttgcatgaaattgtccatacctgcttagtactcatctcattattttgtcattgtgcgcatatctgttcatatgatttcttatggaagttattaagtattttgatttctgtttcagtcagatttccaacagagaagtagaaccagtagaaaatatatcttaagatacttattggagggaattaacttacatggttgtgggaaccggcatagccgacctaaaatttatatggctgactatcaaaaaagacaggctggaactcttaggcacaggcagaagttgcagttcacaggtgaaatttgttctttatcctggaagcctgggctctgctctttagatttagcagctgactgaatcaagtccacctagattacctaggataatcttgtttacgattatgattatcactaccagttatcaactgattttgaacttcattcacatctacaaaataccttcataggaacatctagatcagtgttggattaaataactatcagctgtagcctagccatgttgacccatcaaaagaccatcacaattgctgatataactttaataaaatttgcaacattttcagatggaagaattgagaaaagggaagcgggctgacttttcattttagaatttattatgcattaacttaaagtaagtaataattatgtaggtgatcattttgatattttaacctacttaatttagaaaatcatttaaaatcatttttgttaagactacaaaatgattttgggtaaaaaaaaattttaccaaatatcaagatcacaataatcacttaaaatagttacatatgtaactaacctgcacaatgtgtacatgtaccctaaaacttaaagtataataaaaaaaaaaaaaaaaaaaaaaaaaaaaaaaaaaaaaa

SEQ ID NO: 176 - DNA, 813 bp, Homo sapiens
  misc_feature (16)..(16): n equals a,t,g, or c
gaatccccccgggctncaaggaatttcggcaacgagggactacagtgaggacgaaatctaccgcttcaacagccccctggacaagaccaacagccttatctggaccacgaggaccacaaggaccaccaaagactcagcctttcacatcatgtcccacgagagcccaggcatcgagtggctctgtctggagaatgccccatgctatgacaatgttccccaaggcatctttgcccctgaattcttcttcaaggtgttggtgagcaatagaggagtggacacgagcacctactgcaactaccagctcaccttcctgctgcacatccacgggctgccactcagtcccaagcgggcccttttcatcatcatggtgtcagctagcgtgtttgtgggcctggtgatcttctacatcgccttctgcctcctgtggcccctcgtggtgaagggctgcacgatgatccggtggaagataaacaacctcattgcctcagaatcctactacacctacgcctccatttccggaatctcgagcatgccatctctgagacattccaggatgggctccatgttcagctccaggatgacagaggacagggctgaacccaaggaagccgtggagagacagttgatgacctgagtgtcccacctgccccagcccccagttactgtcacgcctctcttatgaggcccatcttgaagatgcaacctgtcacccagcccaggcctctctttctgttttgcttgatgtttacttctcgttcagactcaaataaagccttttttcaggaccaaaaaaaaaaaaaaaaaaaactcgag

SEQ ID NO: 177 - DNA, 848 bp, Homo sapiens
ggcacgagcactactgtaagagctggtcagtgaatgtggttgcagcatggcctttgggcaagaagtaacccatttaactaaaaccagctggttggccccactcagatttatcaaagggttactgggtccctgggggtggatattgcttatattagacttagaatagcatactgttttaatattatatgaactaaaatgtttctttaaaaaaagagtggtctgttaatggatttatgtagtggtcaagaatttagacttcagagtcaaataaacctatatcagtcctagtcctacagtttactaattgtgagatgtcaagcaagtttttgaactcctctaagcctctgttttcttatctataaattaataaatgaatgaatcgggttgagtgaatatttagtaaattcttagtacatactagttatttgtaactgtgagactggttttttggtatggttttcacatttgggagtagaaataccacttcctaaagtctgttttatctcaaattctctatccaggcatagtgtaaagtgaaatacctagatttcttgattaatatacagataatggccagacgccatggctaaaacctgtgacgctagcacttcggaaggctgaggcgggcggatcacttgaggtcaggagttggagaccagcctggcaaacatggcgaaaccctgtctctactaaaaatacaaaaattagctggatgtggtggcaggtgtctgtaatcccagctacttaggaggctgagacaggagaactccttgagaattgctccactgccctccagcctgggcaacagagtgagacacttcatctcaaaaaaaaaaaaaaaaaaaaaa

SEQ ID NO: 178 - DNA, 1650 bp, Homo sapiens
ggaacctcatcaacgctgacttctgcgtggcctctgtctgcgtggcctttggggcagttctgggtaaagtcagccccattcagctgctcatcatgactttcttccaagtgaccctcttcgctgtgaatgagttcattctccttaacctgctaaaggtgaaggatgcaggaggctccatgaccatccacacatttggcgcctactttgggctcacagtgacccggatcctctaccgacgcaacctagagcagagcaaggagagacagaattctgtgtaccagtcggacctctttgccatgattggcaccctcttcctgtggatgtactggcccagcttcaactcagccatatcctaccatggggacagccagcaccgagccgccatcaacacctactgctccttggcagcctgcgtgcttacctcggtggcaatatccagtgccctgcaaagaagggcaagctggacatggtgcacatccagaatgccacgctcgcaggaggggtggccgtgggtaccgctgctgagatgatgctcatgccttacggtgccctcatcatcggcttcgtctgcggcatcatctccaccctgggttttgtatacctgaccccattcctggagtcccggctgcacatccaggacacatgtggcattaacaatctgcatggcattcctggcatcataggcggcatcgtgggtgctgtgacagcggcctccgccagccttgaagtctatggaaaagaagggcttgtccattcctttgactttcaaggtttcaacggggactggaccgcaagaacacagggaaagttccagatttatggtctcttggtgaccctggccatggccctgatgggtggcatcattgtggggctcattttgagattaccattctggggacaaccttcagatgagaactgctttgaggatgcggtytactgggagatgcctgaagggaacagcactgtytacatccctgaggaccccaccttcaagccctcaggaccctcagtaccctcagtacccatggtgtccccactacccatggcttcctcggtacccttggtaccctaggctcccagggcaggtgaggagcaggctccacagactgtcctggggcccagaggagctggtgctgacctagctagggatgcaagagtgagcaagcagcacccccacctgctggcttggcctcaaggtgcctccacccctgccctccccttcatcccagggggtctgmctgagaatggagaaggagaagctacaaagtgggsatccaagccgggttctggctgcagaagttctgcctctgcctggggtcttggccacattggagaaaaacaggctcaaagtggggctgggacctggtgggtgaacctgagctctcccaggagacaacttagctgccagtcaccacctatgaggctcttctaccccgtgcctgcacctcggccagcatctcctatgctccctgggtcccccagacctctytgtgttgtgtgcgtggcagcctccaggaataaacattcttgttgtcctttgtaaaatggtgtgaatgctccaatggggccagtttgagggagaaaaggacccaagagacctgcttctgccccagcccttaccttcatccaagggtaccaaccacactgcga

SEQ ID NO: 179 - DNA, 712 bp, Homo sapiens
  misc_feature (565)..(565): n equals a,t,g, or c
gaattcggcacgagctggacaggaccggagaggaccccgcgtaaccgcggaacagacactcccggcagcggccgccgccgcggcactgctacgggacgagccggagcgcttggccatggcggcccgatccgcactggcgctgctgctgctgctgccagtcctgctcctgccggtgcagagycgctcagagcccgagaccaccgcgcccacccctaccccaatcccgggtggcaactcgtcaktgagcaggcccctgcccagcatcgagctccacgcctgcggcccataccccaaaccaggcctgctcatcctgctggccccgctggccctgtggcccattctcctgtagggacgcccagccagccacctctaagtcgccgctgggactggcctgccccattgagcaacagagacgcttgacagccgcccgcctccattccttgacttcacccagaaatgggtccagaaaactgaatcccaccagcactggtttggagcaaccggacaccgaggtttcacctccagggrttccatggaagagcctcaatggagatgccacatcctnactgagttaaagatgggctgaggaacttgggtacccacaagtytgccttgggratcaaaagaaaatatttacctttagtttggttcattaaatgcatgaagtcaaaatatgaaaaaaaaaaaaaaaaaaaaaaaaaaaaaaactcga

SEQ ID NO: 180 - DNA, 1074 bp, Homo sapiens
gctttcctgtgtcccagcttttctgcgggtcttggcacctttcttggccacagatttctgggttacagagcatgtgtgtctgaggcattgcaggcagaaaagggtggccgacgtgacctctagctggactgctgggcaggggagctgtcctagataaaattggaaagaaacagtgacccagagacaggtggacaaagaattcggggactgatgggaactgagcttgggatccagactgaaactgattccagactgacctctagcacccaggacccagacacagggccatgggaccccagcatttgagacttgtgcagctgttctgccttctaggggccatctccactctgcctcgggctggagctcttttgtgctatgaagcaacagcctcaagattcagagctgttgctttccataactggaagtggcttctgatgaggaacatggtgtgtaagctgcaagagggctgcgaggagacgctagtgttcattgagacagggactgcaaggggagttgtgggctttaaaggctgcagctcgtcttcgtcttaccctgcgcaaatctcctaccttgtttccccacccggagtgtccattgcctcctacagtcgcgtctgccggtcttatctctgcaacaacctcaccaatttggagccttttgtgaaactcaaggccagcactcctaagtctatcacatctgcgtcctgtagctgcccgacctgtgtgggcgarcacatgaaggattgcctcccaaattttgtcaccactaattcttgccccttggctgcttctacgtgttacagttccaccttaaaatttcaggcagggtttctcaataccaccttcctcctcatggggtgtgctcgtgaacataaccagcttttagcagattttcatcatattgggagcatcaaagtgactgaggtcctcaacatcttagagaagtctcagattgttggtgcagcatcctccaggcaagatcctgcttggggtgtcgtcttaggcctcctgtttgccttcagggactgaccatctagctgcacccgacaagcacccagactctttcacataacaa

SEQ ID NO: 181 - DNA, 978 bp, Homo sapiens
gctcacaagataatatctcttgcctttttcctctcggagtgttcctgcggtttgtgatctctcttagctctggtagcctgttcaggccttaaggtatctgttcggtattatgtggtcaagtagctgggaccacaggatcacaacaccacgtctggctaatttttttttttttttttttttttttttttttgtagagatggggtttcgctatgttggccaggctggtctcaaactcctggcctcaagcaatcttccagccttggcctcccaaagtgctgggattacaggtgtgagccaccacktctggcttggagggcttattaaaacmccgattcttagcctcacccccagagtttctggttagtaggtcttggcagggctggagaattkgaatttccacaccttccttggtgatgtgttgttggtagttcagggagtacatgtgagaggaaccgtttagatagkaaaaactgcaaacctgaagaagaatagaagaatccttattctgkgctctcttagatttagtttcctcatctatgatcaataactattcatttcttcctcatttccaataacgatttgctgcttttaagagcaagagatcacttttccttcatgttgttttgctagtggcaaatcagaaatggtttcgccagtattcactgatcttgtaatcactctcggaatccagctgcatctctagtgtagagttttgggtcaacaagaataawrmwgagcttaaagaattggactcagactcttgaagtcaggggttgatgagaaggtggctctaatctattcattcaacaacttcctattgagcacctgctatgtgccaggtgctgttctagccactaagatagagcaggtaataacatagggccattgtccttatggaatttgtattgtagtggggtgaataaaaaagggcagtctaggtggggcccggaaaaaaaaaaaaaaaaaaaaaaaactcga

SEQ ID NO: 182 - DNA, 1466 bp, Homo sapiens
ggcacgagtgcctcaaagactattatttgggaggatctagtgcaaatgttagtaatgtggatattgtgtagtgtcccaggatattaatgtttttagcctcttggcttttattctgtattgttgccccaaaagatgatgctcacttatctttcatccagtgtaaggatatctggaaagacaacagaaagtatagctgttttcatttcaaaagtgatcagctgcttgagctagcaagcaaggcttgcactagcttccaggcgcagtcacgcagtttcacagcaggcgcggttccctcggagcacccagagctgccctgcggtagtcagcagttgtgctgtggctgcactgccaggctgggtggcargtggatcggagccagcagatgtggctcaggaagtgccttcttggcctctccttaatctctttcagastctgtgggcccttgattgcactgtgggttgtttcagactccagtattaggagactgaaccccttggtggttttttggtgtgtgtgtgctgagmtgggttgaggacatgttaagcaggtggggtgcytcccctgggtttgctccgggtggtacctgtggtgtggggtggttctgagtagttctggccccactgctggagtatctgcccaytcagtttgtgagatggcagggcttcatcctggtctggtgcctcattttcttctttagcagtgggcttagaaccaatgcagattcccaagttaagtattttttctgtagcttaattattacaggcttctggtacctaagccctttcttactttctgttctgaggggaagagaagataatgttgtttctccgccccccccggagtggccccaggaccttgcatggcatttgcagcatttgcagcgtgcttgggtttgctttactagggtgaaagtgttgcaccccccagcacccacaaaggcacctctgctcaccctccggtgaggttctgactggccctgggacatcacstgctccaggatcctatgtggctcatcccaggagagatgtgggagggaaggggaaaaaaggcttacatttgctgagtggaattcatgtagatctgagttccgcattgattcctaagctgcagagcccttatgccttggctgttttgtgaatgttagtcggtcttaacctttttcaccgagttagcattggctgtctcaggaggctcacagctcctgctcctcctccaggggagtgcgccctcctcctctgtcggtagctgtcaggtgcccctttcctctgcagcagactgtcctgggtccttgcctggccttccccttacacgtgagcctgcagcttcattcacagcccctgtgtagaaagataggcactaaaagcagctgactggcagccctagaaacatgaagggtttcatttatagtttcagtccttttccttctttcgagccttaatttaaaaaaaaaaaaaaaaaaactcgta

SEQ ID NO: 183 - DNA, 946 bp, Homo sapiens
ggcacgagcgaaagcctctctcttaacaacggtgccgcacagctttgcccttgaaagcatctctactggaccggaacacactcatgtgccccgctccctgacccagccaaggctgccctttcatctccaaggctgagatgttgccggtggtcccatgagagcctgcccatgggctcaggtgcccctttaccttctgctggatggacatctggctgtgagccaggctggggtcatggccggggtgagcggaggcaggggtggacggaggcttcgagggcccatcactagtagggtcattacctcttgccaacagccgggggtgggagtctgggtctcgctcaggccagagcttctcaacctggagtccctgggggtggctgccaaaggtgtgtatgacaagcacgtatccctggacatttccggggagaggtctggggctttggtcacattctccaagggctgctgggcttcggagcagtccccccccatgtctcagccactacagggtccctctctctccttgcaccccagaccctccgctgccctggtaatgagcagaaggaaagtcttggggtgtgctcaaagtcaggagagcaaaatatgccaggcaaaagctcccgggaaaagccggaggagtctggggtggccaccgggatgtggagcagcgagggcaaagacggtgaacacagccctccagctgtctgagcctcagttttctaatctgtagaatggggatgatcatacctgcctcacaagaatgttgagacaattcacagagacgttctggagcccctttcccccgagaccggcattcatgagtctgctgggaccagaaaacccatctcaggggcccagcggggcacccaggagagtctggcggtgcaagcgctgtataaaccacaagcgttctccaaaaaaaaaaaaaaaaaaaaaaaaaaaaaaaaaa

SEQ ID NO: 184 - DNA, 1949 bp, Homo sapiens
ggcacgagatctacctggaatgaacaagaatgaacgccagcctcatttcatgggttttggttctccacaggatctgcctcggtctgtcagacattcctaaggaaaattgtataataactatttcgggaatgcagttatctcatcatggtcagtctttggggaagtgggctgagaaattacatgtgttctattctctattttcattcctattgtgaccttcacaccgactcaaaaccttccttttagatacttctggatataaaaatatatgttaattttggggtttcacactcctgagtgaaaggcagtgtcatcaagtacgtgaatgcccagctcctaaatgtctttctcgttctcctcccacccagtcacgtcctccaggcagtgaccttcctttatttcacattccgcttacttccttgacccctcagcatttcagacctgaaaggacactggtactgttgtccttgtcggggcctgtggctttgcctctcattccctggtgaatgtcaggaaatagagggctgagactaatttttataggttctcaatttttcttgcttggggacaagctgttgacttagctctgaataggagtaataaggaggcagtgggccaggctgcatgacaactggttttcaggcccatataaaaaagtactaactttattatctcaagccatgcctggcctattgcaaagcccagtgtgggtgtcttggggcttgtatttgagattggagcttctctgacctccagtaccctttcctcaggggccacagtgtgtgtcacatgaatggcaaggtgaggtgaggcttgggggagctcctggtgctgtgtcacaccaccttacctgtgtgcattactctgtgcttgttcttttgcatacatctgctgatttgaacctcacggctctgacttaaggagcaggtaggtagggcatgtggtccttccctcccgtttcaaagacaaggaaagtgagtcacagagtagtgcactggcttacccaggacatacagtggcagagccaagactggagcctagctgcttgtactaaccatgccagtgccaccattaaccccaagtcactagtggtagctacttctgactatgactgtagtcactgtctcctggagaggagcctggccaccagattgatagtcccagctgagactctctcctgaactgataagctgttttgcatgcttggaatgcctttccccagtttgttcacctgataaactcatccttatcctcaagattcagcccagaagacacccttaaaggaagccttggctgtccttcccacccagtgttccctcactgacttctgttgctgctcacactgcattttacctgcttgcctccttccatgtgttcccagctagccagtaaattctttaaagacaagcattgtaccctttgcctcagtgtgcccagcaccaacctggcacatgctctattcatgttttccatgagtgtttcatgttagaggtgtattttgtacacaggttttatgctgggggctcagagagaagtggacagcagattgttggccctcccaggaagaaaagtcccaacgagctggtggatgatctctttaaaggtgccaaagagcatggagctgtagctgtggagcgagtgacaaagagctggctgatgagagccagaccctgaaggaagccaacctgctcaatgctgtcatcgtgcagcggttaacataaccgcccagccagctgcctggcctccctcctgtgtttcccatggccagtggccatgccccatggggatcgcccctcctgcccccttgtgcatacccagcagtccagtgcaacgtctcctccatagctctgggttcttagatcttggttggacgtttgttttctccttagttgcatttcctgggtttttgtgatgatcaatggactttaatgaaaaaaaaaaaaaaaaaa

SEQ ID NO: 185 - DNA, 1374 bp, Homo sapiens
ggcacgaggtccggcctccctgacatgcagatttccacccagaagacagagaaggagccagtggtcatggaatgggctggggtcaaagactgggtgcctgggagctgaggcagccaccgtttcagcctggccagccctctggaccccgaggttggaccctactgtgacacacctaccatgcggacactcttcaacctcctctggcttgccctggcctgcagccctgttcacactaccctgtcaaagtcagatgccaaaaaagccgcctcaaagacgctgctggagaagagtcagttttcagataagccggtgcaagaccggggtttggtggtgacggacctcaaagctgagagtgtggttcttgagcatcgcagctactgctcggcaaaggcccgggacagacactttgctggggatgtactgggctatgtcactccatggaacagccatggctacgatgtcaccaaggtctttgggagcaagttcacacagatctcacccgtctggctgcagctgaagagacgtggccgtgagatgtttgaggtcacgggcctccacgacgtggaccaagggtggatgcgagctgtcaggaagcatgccaagggcctgcacatagtgcctcggctcctgtttgaggactggacttacgatgatttccggaacgtcttagacagtgaggatgagatagaggagctgagcaagaccgtggtccaggtggcaaagaaccagcatttcgatggcttcgtggtggaggtctggaaccagctgctaagccagaagcgcgtgaccgaccagctgggcatgttcacgcacaaggagtttgagcagctggcccccgtgctggatggtttcagcctcatgacctacgactactctacagcgcatcagcctggccctaatgcacccctgtcctgggttcgagcctgcgtccaggtcctggacccgaagtccaagtggcgaagcaaaatcctcctggggctcaacttctatggtatggactacgcgacctccaaggatgcccgtgagcctgttgtcggggccaggtacatccagacactgaaggaccacaggccccggatggtgtgggacagccaggcctcagagcacttcttcgagtacaagaagagccgcagtgggaggcacgtcgtcttctacccaaccctgaagtccctgcaggtgcggctggagctggcccgggagctgggcgttggggtctctatctgggagctgggccagggcctggactacttctacgacctgctctaggtgggcattgcggcctccgcggtggacgtgttcttttctaagccatggagtgagtgagcaggtgtgaaatacaggccttcatccgttaaaaaaaaaaaaaaaaaaaaa

SEQ ID NO: 186 - DNA, 3059 bp, Homo sapiens
ggcacgagctgtcatccgtttccatgccgtgaggtccattcacagaacacatccatggctctcatgctcagtttggttctgagtctcctcaagctgggatcagggcagtggcaggtgtttgggccagacaagcctgtccaggccttggtgggggaggacgcagcattctcctgtttcctgtctcctaagaccaatgcagaggccatggaagtgcggttcttcaggggccagttctctagcgtggtccacctctacagggacgggaaggaccagccatttatgcagatgccacagtatcaaggcaggacaaaactggtgaaggattctattgcggaggggcgcatctctctgaggctggaaaacattactgtgttggatgctggcctctatgggtgcaggattagttcccagtcttactaccagaaggccatctgggagctacaggtgtcagcactgggctcagttcctctcatttccatcgcgggatatgttgatagagacatccagctactctgtcagtcctcgggctggttcccccggcccacagcgaagtggaaaggtccacaaggacaggatttgtccacagactccaggacaaacagagacatgcatggcctgtttgatgtggagatctctctgaccgtccaagagaacgccgggagcatatcctgttccatgcggcatgctcatctgagccgagaggtggaatccagggtacagataggagactggagaagaaagcacggacaggcaggtaaaagaaaatattcctcttcacacatttatgactcctttccaagtctctcgtttatggatttttatatcctgaggcccgtgggtccctgcagagccaagcttgtgatgggaactctgaaattgcagattctgggggaggtgcattttgtagagaagccccatagccttcttcagatctctggagggtccacaacactcaaaaagggtcccaatccttggtctttcccttctccctgcgccctgtttcccacgtgagcacggaactgcctgctctctctgcttgctttcagaattgagagacgcccggaaacacgcaggtaccaacgcctgagagggtaacagtgggcatggagtaggaagatgaccagtgacagatatggagcccatccagcttgtagacagcaaatctgtgatgcccgaatccaccccagggtgcagctgcctctaaatacacttcttggcccaggacttggagggaaaagcgtagggactgggtcagctaggaggggtcacaggcaagacgccagggaactgagggcattagtagctggcttctaggggtctgtgcaaaggggaacgaagtgaagttagcaggaactggtgggtggaaggaagctgaatcctggagtcactcaaggtctcacaaagtcaaatagagggcttacgtgggagggcagtggtagggctgggtgaacatctcatggttgagcatctccaagcatcagtgaggcacgggggctgccctggagaaggtacatggctggtgggatagtgggactggccggatcctacccggagccagtctgcagtgggagggtcgacctcttgctccagcccagatttcgtcttcagtaactcatgcttcctctctcccccaccgcaccccagtggaggtgactctggatccagagacggctcacccgaagctctgcgtttctgatctgaaaactgtaacccatagaaaagctcctcaggaggtgcctcactctgagaagagatttacaaggaagagtgtggtggcttctcagggtttccaagcagggaaacattactgggaggtggacgtgggacaaaatgtagggtggtatgtgggagtgtgtcgggatgacgtagacagggggaagaacaatgtgactttgtctcccaacaatgggtattgggtcctcagactgacaacagaacatttgtatttcacattcaatccccattttatcagcctcccccccagcacccctcctacacgagtaggggtcttcctggactatgagggtgggaccatctccttcttcaatacaaatgaccagtcccttatttataccctgctgacatgtcagtttgaaggcttgttgagaccctatatccagcatgcgatgtatgacgaggaaaaggggactcccatattcatatgtccagtgtcctggggatgagacagagaagaccctgcttaaagggccccacaccacagacccagacacagccaagggagagtgctcccgacaggtggccccagcttcctctccggagcctgcgcacagagagtcacgccccccactctcctttagggagctgaggttcttctgccctgagccctgcagcagcggcagtcacagcttccagatgaggggggattggcctgaccctgtgggagtcagaagccatggctgccctgaagtggggacggaatagactcacattaggtttagtttgtgaaaactccatccagctaagcgatcttgaacaagtcacaacctcccaggctcctcatttgctagtcacggacagtgattcctgcctcacaggtgaagattaaagagacaacgaatgtgaatcatgcttgcaggtttgagggccacagtgtttgctaatggatgtgtttttatgattatacattttccccaccataaaactctgtttgccttaattcccacattaatttaacttttcctcctatacccaaatccacccatggaatagttaattggaacacctgcctttgtgaggctccaaagaataaagaggaggtaggatttttcactgattctataagcccagcattacctgataccaaaaccaggcaaagaaaacagaagaagaggaaggaaaactacaggtccatatccctcattaacacagacacaaaaattctaaataaaattttaacaaattaaactaaacaatatatttaaagatgatatataactactcagtgtggtttgtcccacaaatgcagagttggtttaatatttaaatatcaaccagtgtaattcagcacattaataaagtaaaaaaaaaaaaaaaaaaaa

SEQ ID NO: 187 - DNA, 1134 bp, Homo sapiens
  misc_feature (1)..(1): n equals a,t,g, or c
  misc_feature (1134)..(1134): n equals a,t,g, or c
ncgccccggactcttctcagttgagagtgcggttcctgggcaggtttccacaccagttcctttccgcgtccttcggccctggctctggctgcctggcggaggtggggtagcatttgtcatttgcacactgctggctttatctttggggctgcaccccgaggcaacaaatgcaggatgctctgtcacccacatgtccaccaccatctggtttgccttttggctactttgactttctccttaaatgcttcctgtgctgagcaaacattccacagccagcagagcaatggagagttcatggccactcttcccagtatcagcaagcaatttggggtgatcgtttggaagcctcagaggaaagatgtcatcaggcttcctgtggctttgtccttcagcagtggggctcggcttgctttcacctgccttaggaagatttctggcttccgagctctgatatggggagaagataagggctgggatctttgagtctgcccctagctgggtatgtgcgtccggtgtgcgggccttggagtttttggtaatgactcacttgtgctctttctgggatctgtctccctcccacatgaccccgtggggtccctgaatgactgttttagagtacccatgtgggttccctgagtcacagcaggggatgtttaataaggaggttagcactgagcttggggacgtgctgtcacaccagcaggacgctgcaggaaggagcaggctacttcctttcttgacgtgcaaataactcgtataggctaatcaacaggcttataagttaaaagggctaccgctcggccccttggggattccatcccctcctctgtaacttggagatgtttgtttctgctgcagactcagagggttgcgatgaagagtggtgggactgagttgagaagcttatcccttcgctgggtgggaggtttctaattgccccgttctttgggggatccttaagtccagcttccaggtgggggcagcgataggaccaagttctcctagtagtctctgggaagccacttgagggaagctgccggtcatcccatgcacccattggtcttctccagcaggccctgtaggtcgtccatgttccatgccttctgggttcttgggggagaaggaagctgttgn

SEQ ID NO: 188 - DNA, 1583 bp, Homo sapiens
ggcacgagggacaacgactatctgctacatggtcatagacctcccatgttctcctttcgggcttgcttcaagagcatcttccgcattcatacagaaactggcaacatctggacccatctgcttggtttcgtgctgtttctctttttgggaatcttgaccatgctcagaccaaatatgtacttcatggcccctctacaggagaaggtggtttttgggatgttctttttgggtgcagtgctctgcctcagcttctcctggctctttcacaccgtctattgtcattcagagaaagtctctcggactttttccaaactggactattcagggattgctcttctaattatggggagctttgtcccctggctctattattccttctactgctccccacagccacggctcatctacctctccatcgtctgtgtcctgggcatttctgccatcattgtggcgcagtgggaccggtttgccactcctaagcaccggcagacaagagcaggcgtgttcctgggacttggcttgagtggcgtcgtgcccaccatgcactttactatcgctgagggctttgtcaaggccaccacagtgggccagatgggctggttcttcctcatggctgtgatgtacatcactggagctggcctttatgctgctcgaattcctgagcgcttctttcctggaaaatttgacatatggttccagtctcatcagattttccatgtcctggtggtggcagcagcctttgtccacttctatggagtctccaaccttcaggaattccgttacggcctagaaggcggctgtactgatgacacccttctctgagccttcccacctgcggggtggaggaggaacttcccaagtgcttttaaaaataacttctttgctgaagtgagaggaagagtctgagttgtctgtttctagaagaaacctcttagagaattcagtaccaaccaagcttcagcccactttcacacccactgggcaataaactttccatttccattctcctagctggggatggggcatggtcaaacttagccatcccctcctcagcaaggcatctaccggcccctcacagagacagtactttgaaactcatgttgagattttaccctctcctccaaccattttgggaaaattatggactgggactcttcagaaattctgtcttttcttctggaagaaaatgtccctcccttacccccatccttaactttgtatcctggcttataacaggccatccatttttgtagcacacttttcaaaaacaattatataccctggtcccatctttctagggcctggatctgcttatagagcaggaagaataaagccaccaacttttacctagcccggctaatcatggaagtgtgtccaggcttcaagtaacttgagttttaatttttttttttttcttggcagagtaatgtaaaatttaaatggggaaagatatttaatatttaatactaagctttaaaaagaaacctgctatcattgctatgtatcttgatgcaaagactatgatgttaataaaagaaagtacagaagacacttggcattcaaaaaaaaaaaaaaaaaaaaaa

SEQ ID NO: 189 - DNA, 1991 bp, Homo sapiens
  misc_feature (300)..(300): n equals a,t,g, or c
  misc_feature (353)..(353): n equals a,t,g, or c
gcgacgctcggcccgaagatggcggccgaatggggcggaggagtgggttactcgggctcaggcccggccggagccggtggcgctggagcgggtctgtgtgggtccgaagcgttttactcctgttgggcgggctccgggccagcgccacatctactcccgtctccttgggcagttcccctccctgccggcaccacgtcccctctgacactgaggtcataaataaagttcatcttaaggcaaatcatgtggtcaagagagatgttgatgagcatttaagaatcaagactgtctatgataaantgktgaasagttgctccctgagaaaaagaatcttgtaaagaacaagcttctcncacawgcgatttcttatttagagaagacttttcaggtccgtcgacctgcgggcactatcttacttagcagacaatgtgcaacaaaccaatacctccggaaggaaaacgatcctcacaggtactgcaccggggagtgtgccgcacacacaaagtgcggccccgttattgttcctgaggaacatctccagcaatgccgggtctaccgtgggggtaagtggcctcatggagcagtgggtgtgccagaccaagaaggcatctcagatgcagactttgttctttacgttggtgctctggccaccgagagatgcagccatgaaaacatcatctcttatgcagcctattgtcagcaggaagcaaacatggacaggccaatagcaggatatgctaacctgtgtccaaatatgatctctacccagcctcaggagtttgttgggatgctgtccacagtgaaacatgaggttattcatgccctgggtttctctgctgggctgtttgcattctaccatgataaagatggaaatcctctcacttcaagatttgcagatggcctyccaccttttaattatagtctgggattatatcaatggagtgataaagtagttcgaaaagtgragagattatgggatgttcgagataataagatagttcgtcacactgtgtatctcctggtaacgcctcgtgttgttgaggaagcacgaaaacattttgattgtccagttctagagggaatggaacttgaaaatcaaggtggtgtgggcactgagctcaaccattgggaaaaaaggttattagagaatgaagcgatgactggttctcacactcagaatcgagtactctctcgaatcactctggcattaatggaggacactggctggtataaagcaaattacagcatggctgagaagttagactggggccgaggaatgggctgtgactttgtcaggaagagctgtaaattctggattgatcagcagagacaaaagagacagatgctgagcccttactgtgacacgctcagaagtaacccactgcagctaacttgcagacaggaccagagagcagttgccgtgtgtaatttgcagaagttccctaagcctttaccacaggaataccagtactttgatgaactcagtggaatacctgcagaagatttgccttattatggtggctccgtggaaattgctgactactgscctttcagtcaggaattcagttggcatttaagtggtgaatatcagcgcagctcagattgtagaatattggaaaatcaaccagaaatttttaagaactatggcgctgaaaagtatggacctcattccgtttgtctaattcagaaatcagcattcgttatggagaagtgtgagaggaagctgagttacccagactggggaagcggatgctatcaggtttcttgttctcctcaaggtctgaaagtttgggtccaagatacttcatatttgtgtagtcgggctgggcaggtcctccctgtcagtatccagatgaatggctggattcacgatggaaacctgctctgcccatcatgttgggacttctgtgagctctgtcctccagaaacagatcctccagccactaacctgacccgagctctgccacttgatctttgttcctgttcctcga

SEQ ID NO: 190 - DNA, 1209 bp, Homo sapiens
ggccacgagagtggatgccattcaccaacccggcccgcaaggacggagcaatgttcttccactggcgacgtgcagcggaggagggcaaggactacccctctgccaggttcaataagactgtgcaggtgcctgtgtactcggagcaggagtaccagctttatctccacgatgatgcttggactaaggcagaaactgaccacctctttgacctcagccgccgctttgacctgcgttttgttgttatccatgaccggtatgaccaccagcagttcaagaagcgttctgtggaagacctgaaggagcggtactaccacatctgtgctaagcttgccaacgtgcgggctgtgccaggcacagaccttaagataccagtatttgatgctgggcacgaacgacggcggaaggaacagcttgagcgtctctacaaccggaccccagagcaggtggcagaggaggagtacctgctacaggagctgcgcaagattgaggcccggaagaaggagcgggagaaacgcagccaggacctgcagaagctgatcacagcggcagacaccactgcagagcagcggcgcacggaacgcaaggcccccaaaaagaagctaccccagaaaaaggaggctgagaagccggctgttcctgagactgcaggcatcaagtttccagacttcaagtctgcaggtgtcacgctgcggagccaacggatgaagctgccaagctctgtgggacagaagaagatcaaggccctggaacagatgctgctggagcttggtgtggagctgagcccgacacctacggaggagctggtgcacatgttcaatgagctgcgaagcgacctggtgctgctctacgagctcaagcaggcctgtgccaactgcgagtatgagctgcagatgctgcggcaccgtcatgaggcactggcccgggctggtgtgctagggggccctgccacaccagcatcaggcccaggcccggcctctgctgagccggcagtgactgaacccggacttggtcctgaccccaaggacaccatcattgatgtggtgggcgcacccctcacgcccaattcgagaaagcgacgggagtcggcctccagctcatcttccgtgaagaaagccaagaagccgtgagaggccccacggggtgtgggcgacgctgttatgtaaatagagctgctgagttggaaaaaaaaaaaaaaaaaaaaaaaaaaaa

SEQ ID NO: 191 - DNA, 853 bp, Homo sapiens
  misc_feature (1)..(1): n equals a,t,g, or c
  misc_feature (75)..(75): n equals a,t,g, or c
naaggcaaatttcttcctcagtcgtgtggcaggccctgagcaggcagctgggtgtccccgctcagatccaggccncgaatgggctgggcgggttgcagaagccatcacctgagctacccagggtgggatccctggccccgacctctgtcctgacacgccccaagcggcagcaacaaagccccaattggcctgggcctgggcaggaggagctgggccgggtgccagatactgggatcagccactgcagctccctgagcactctctacagagacgcggaccccagacatgaggaggctcctcctggtcaccagcctggtggttgtgctgctgtgggaggcaggtgcagtcccagcacccaaggtccctatcaagatgcaagtcaaacactggccctcagagcaggacccagagaaggcctggggcgcccgtgtggtggagcctccggagaaggacgaccagctggtggtgctgttccctgtccagaagccgaaactcttgaccaccgaggagaagccacgaggtcagggcaggggccccatccttccaggcaccaaggcctggatggagaccgaggacaccctgggccgtgtcctgagtcccgagcccgaccatgacagcctgtaccaccctccgcctgaggaggaccagggcgaggagaggccccggttgtgggtgatgccaaatcaccaggtgctcctgggaccggaggaagaccaagaccacatctaccacccccagtagggctccaggggccatcactgcccccgccctgtcccaaggcccaggctgttgggactgggaccctccctaccctgccccagctagacaaataaaccccagcaggccgggttat

SEQ ID NO: 192 - DNA, 1757 bp, Homo sapiens
aggctttccacccagaccgtcaacttcgggacagtgggggagacggtcacccttcacatctgcccagacagggatggggatgaggcggcacagcctgatgctgctgccatggtggcttggggcagcggggagaaaggagtgtcacagggagcagctcgtggctgcagtggaagtcactgagcaagagactaaagtccccaagaaaaccgtcatcatagaagagaccatcaccactgtggtgaagagcccacgtggccaacgacggtyccccagcaagtccccctcccgctcaccttcccgctgctctgccagcccgctgaggccaggcctactggcccccgacctgctgtacctgccaggtgctggccagccccgcaggccggargcagaaccaggccagaagcccrtggtgcccacactgtatgtgacggaggccgaggcccactctccagctctgcccggactctcggggccccagcccaagtgggtggaggtggaggagaccattgaagtccgggtgaagaagatgggcccgcagggtgtgtctcccaccacagaggtgcccaggagctcatcggggcatctcttcacactgcccggtgcgacccccggaggggaccccaattccaacaactccaacaacaagctgctggcccaggaggcctgggcccagggcacagccatggtcggcgtcagagagccccttgtcttccgcgtggatgccagaggcagtgtggactgggctgcttctggcatgggcagcctggaggaggagggcaccatggaggaggcgggagaggaagagggggaagacggagacgcctttgtgacggaggagtcccaggacacacacagccttggggatcgtgaccccaagatcctcacgcacaacggccgcatgctgacactggctgacctggaagattacgtgcctggggaaggggagaccttccactgtggtggccctgggcctggcgcccctgatgaccctccctgcgaggtctcggtgatccagagagagatcggggagcccacggtgggcagcctgtgctgctcagcgtggggcatgcactgggtccccgaggccctctcggcctctttaggcctgagccccgtggggcgtcaccaccgggaccccaggtccgtagccttgagggcacctccttcctcttgcgggaggccccggctcggcctgtgggcagtgctccctggacgcagtctttctgcacccgcatccggcgttctgcggacagtggccagagcagcttcaccacagagctttccacccagaccgtcaacttcgggacagtgggggagacggtcacccttcacatctgtcsctggccwcgggccttcttacctcactcaacttcagccaggaggactgggtggtgcttgcaatgttggaatgaccggctcaaagacctcagctctgggctgtttcctgtcagcctggcaggagcctcaggactgtggacgaaggatgtggccttgggcatttgtcctgttcccacatgggcctggtccctccctcctggccccagccacagctgccaggcctgacatggccttgcctctcctgcagtcttggtgactgagacccttgggtggcgcttcccagctctgcaggccctcctggccttttctgcagggtggacacagggtctgtgtgtgggcagcagcccctgtctctcagcaagaataaagcagcttcctgtgcaaaaaaaaaaaaaaaaaaaaaactcgagcggcacgag

SEQ ID NO: 193 - DNA, 2733 bp, Homo sapiens
gtgttgacggcgctgcgatggctgcctgcgagggcaggagaagcggagctctcggttcctctcagtcggacttcctgacgccgccagtgggcggggccccttgggccgtcgccaccactgtagtcatgtacccaccgccgccgccgccgcctcatcgggacttcatctcggtgacgctgagctttggcgagagctatgacaacagcaagagttggcggcggcgctcgtgctggaggaaatggaagcaactgtcgagattgcagcggaatatgattctcttcctccttgcctttctgcttttctgtggactcctcttctacatcaacttggctgaccattggaaagctctggctttcaggctagaggaagagcagaagatgaggccagaaattgctgggttaaaaccagcaaatccacccgtcttaccagctcctcagaaggcggacaccgaccctgagaacttacctgagatttcgtcacagaagacacaaagacacatccagcggggaccacctcacctgcagattagacccccaagccaagacctgaaggatgggacccaggaggaggccacaaaaaggcaagaagcccctgtggatccccgcccggaaggagatccgcagaggacagtcatcagctggaggggagcggtgatcgagcctgagcagggcaccgagctcccttcaagaagagcagaagtgcccaccaagcctcccctgccaccggccaggacacagggcacaccagtgcatctgaactatcgccagaagggcgtgattgacgtcttcctgcatgcatggaaaggataccgcaagtttgcatggggccatgacgagctgaagcctgtgtccaggtccttcagtgagtggtttggcctcggtctcacactgatcgacgcgctggacaccatgtggatcttgggtctgaggaaagaatttgaggaagccaggaagtgggtgtcgaagaagttacactttgaaaaggacgtggacgtcaacctgtttgagagcacgatccgcatcctgggggggctcctgagtgcctaccacctgtctggggacagcctcttcctgaggaaagctgaggattttggaaatcggctaatgcctgccttcagaacaccatccaagattccttactcggatgtgaacatcggtactggagttgcccacccgccacggtggacctccgacagcactgtggccgaggtgaccagcattcagctggagttccgggagctctcccgtctcacaggggataagaagtttcaggaggcagtggagaaggtgacacagcacatccacggcctgtctgggaagaaggatgggctggtgcccatgttcatcaatacccacagtggcctcttcacccacctgggcgtattcacgctgggcgccagggccgacagctactatgagtacctgctgaagcagtggatccagggcgggaagcaggagacacagctgctggaagactacgtggaagccatcgagggtgtcagaacgcacctgctgcggcactccgagcccagtaagctcacctttgtgggggagcttgcccacggccgcttcagtgccaagatggaccacctggtgtgcttcctgccagggacgctggctctgggcgtctaccacggcctgcccgccagccacatggagctggcccaggagctcatggagacttgttaccagatgaaccggcagatggagacggggctgagtcccgagatcgtgcacttcaacctttacccccagccgggccgtcgggacgtggaggtcaagccagcagacaggcacaacctgctgcggccagagaccgtggagagcctgttctacctgtaccgcgtcacaggggaccgcaaataccaggactggggctgggagattctgcagagcttcagccgattcacacgggtcccctcgggtggctattcttccatcaacaatgtccaggatcctcagaagcccgagcctagggacaagatggagagcttcttcctgggggagacgctcaagtatctgttcttgctcttctccgatgacccaaacctgctcagcctggacgcctacgtgttcaacaccgaagcccaccctctgcctatctggacccctgcctagggtggatggctgctggtgtggggacttcgggtgggcagaggcaccttgctgggtctgtggcattttccaagggcccacgtagcaccggcaaccgccaagtggcccaggctctgaactggctctgggctcctcctcgtctctgctttaatcaggacaccgtgaggacaagtgaggccgtcagtcttggtgtgatgcggggtgggctgggccgctggagcctccgcctgcttcctccagaagacacgaatcatgactcacgattgctgaagcctgagcaggtctctgtgggccgaccagaggggggcttcgaggtggtccctggtactggggtgaccgagtggacagcccagggtgcagctctgcccgggctcgtgaagcctcaggtgtccccaatccaagggtctggaggggctgccgtgactccagaggcctgaggctccagggctggctctggtgtttacaagctggactcagggatcctcctggccgccccgcagggggcttggagggctggacggcaagtccgtctagctcacgggcccctccagtggaatgggtcttttcggtggagataaaagttgatttgctctaaaaaaaaaaaaaaaaaaaaaaaaaa

SEQ ID NO: 194 - DNA, 1051 bp, Homo sapiens
gcgcggccctccccatgtgcagccggccagccgggctctcctcctcgcggcggatgggtgaccttttcctggcacgggcaggctgtgggaggcagcggagcaggcgatgaagaagaagcagcagcatcccggcggcggcgcggatccctggccccatggggcccctatggggggcgcccctccgggcctgggcagctggaagcgtcgggtgcccctgctgcctttcctgcgcttctccctcctctatcagctcagcgggggaccccctcgcttcctgctcgacctgcggcagtacttgggaaattccacttacttggatgaccatggaccacctcctagtaaggtactacctttcccaagccaggtggtgtacaacagggtaggcaagtktgggagccgtactgtggtcttgcttctgagaatcttgtcggagaagcacggatttaatttggtcacatcagacattcacaacaaaaccaggcttactaaaaatgaacaaatggaactgattaaaaatataagtactgccgaacaaccctatttattcactcgacatgttcatttcctcaacttctcaaggtttggaggagaccagcctgtctacatcaacatcattagagaccccgtcaaccggttcttatccaactattttttccgtcgctttggagactggagaggggaacaaaatcacatgatccgcacccccagcatgaggcaggaggagcgctacctggatatcaatgagtgtattcttgaaaactatcccgagtgctccaaccccaggttattttacatcattccgyacttkkgtggacagcatcccagatgcagggagcctggtgaatgggcccttgagagagcaaagctgaacgtgaatgaaaacttcctgctcgtggggattcttgaagagttggaagatgtgctgctgttactggaaagatttttacctcattacttcaagggsgtgctcagtactacaaagacccagagcacaggaagcttggaaacatgactgtgacggtgaagaagactgtcccctctcctgaggctg

SEQ ID NO: 195 - DNA, 1317 bp, Homo sapiens
ccacgcgtccggacgccgccacctccggaacaagccatggtggcggctacggtggcagcggcgtggctgctcctgtgggctgcggcctgcgcgcagcaggagcaggacttctacgacttcaaggcggtcaacatccggggcaaactggtgtcgctggagaagtaccgcggatcggtgtccctggtggtgaatgtggccagcgagtgcggcttcacagaccagcactaccgagccctgcagcagctgcagcgagacctgggcccccaccacttcaacgtgctcgccttcccctgcaaccagtttggccaacaggagcctgacagcaacaaggagattgagagctttgcccgccgcacctacagtgtctcattccccatgtttagcaagattgcagtcaccggtactggtgcccatcctgccttcaagtacctggcccagacttctgggaaggagcccacctggaacttctggaagtacctagtagccccagatggaaaggtggtaggggcttgggacccaactgtgtcagtggaggaggtcagaccccagatcacagcgctcgtgaggaagctcatcctactgaagcgagaagacttataaccaccgcgtctcctcctccaccacctcatcccgcccacctgtgtggggctgaccaatgcaaactcaaatggtgcttcaaagggagagacccactgactctccttcctttactcttatgccattggtcccatcattcttgtgggggaaaaattctagtattttgattatttgaatcttacagcaacaaataggaactcctggccaatgagagctcttgaccagtgaatcaccagccgatacgaacgtcttgccaacaaaaatgtgtggcaaatagaagtatatcaagcaataatctcccacccaaggcttctgtaaactgggaccaatgattacctcatagggctgttgtgaggattaggatgaaatacctgtgaaagtgcctaggcagtgccagccaaataggaggcattcaatgaacattttttgcacataaaccaaaaaataacttgttatcaataaaaacttgcatccaacatgaatttccagccgatgataatccaggccaaaggtttagttgttgttatttcctctgtattattttcttcattacaaaagaaatgcaagttcattgtaacaatccaaacaatacctcacgatataaaataaaaatgaaagtatcctcctcaaaaaaaaaaaaaaaaaaaaaaaaaaaaaaaaaaaaaaaaaaaaaaaaaaaaaaaaaaaaaaaaaaaaaaaaaaaaaaaaaaaaaaaaaaaa

SEQ ID NO: 196 - DNA, 1138 bp, Homo sapiens
ccacgcgtccgggcgcctgtagtcccagctattcaggaggccgaggcaggagaattgcctgaactcaggaggcggagttgcagtgagccgagatcgcgccattgcactccagcctgggtgacagagtgagactctttctcccaaaaaaaaaaaaaaaaaaaaagtcaaatgcagctgggaatgtggttcgtgcctttttgtatattaaccatttgaaacttggttgtaaggtggggttggcaatgtcaggcctggctgcagcagctcatgtctttagagtgtgcctcttccctctctcgtggggctcgagcaagactaccttcatacatgggctctccagttacatagcaactccagtgttaaattccatcttttcttcctggaaaagccgtagaaaggacacctggacatgcctgctgcacaggttgtctgccttccccatcagccgcagaaggaggaactttgctctcttctctcacagctgtgtgtgcataagaagtagttcggatgatgtgggtcccaccatgtattccttctctgttccatgtagagtaaaataaatgggagttctgtttaatgcatcacctcggttcatattgcatttgccaagaaagtgcaattttattgaacattaggattgaattcttaactgagtaatcaatttcagtagtaagttaaaatgccttctattaatggacaactgcaaccgttaatcagagttacagtagattaacagttgtcagcatttatgctaatagcactaataaaccgtgggctcatgatttgcactttataattccatatttctcaaaacagttggtaatactttttgcttgaaggtattgattcttttgtccctttgcttgctacttggagatgtagagaaagctaaatgacattttcacggtgatgacacaatatcaccttctgcttttgcacacttggctttgtgtcaaaatagatggaaagggttcatttgttctggtgctctactgtttaatttgatctggtgtgtgactaaagcaagacaaatagtatttttaatgaaaccatttaataacctctggtagcttagagtcgaaggcattggaaaaatgcaattaaaggatgcctagatgtaaacaaaaaaaaaaaaaaa

SEQ ID NO: 197 - DNA, 1021 bp, Homo sapiens
ccacgcgtccggataggcacaggacaggagtaggcacctcgcctactgctgcttaacctttcagcttctccaggcccccaatcctgcttgctcccagcttgggaacgagacactgctgagctggaagacttcgcgggccacaggcacagccttcctgctgctggcggcgctgctggggctgcctggcaacggcttcgtggtgtggagcttggcgggctggcggcctgcacgggggcgaccgctggcggccacgcttgtgctgcacctggcgctggccgacggcgcggtgctgctgctcacgccgctctttgtggccttcctgacccggcaggcctggccgctgggccaggcgggctgcaaggcggtgtactacgtgtgcgcgctcagcatgtacgccagcgtgctgctcaccggcctgctcagcctgcagcgctgcctcgcagtcacccgcccttcctggcgcctcggctgcgcagcccggcctggcccgccgctgctgctggcggtctggctggccgccctgttgctcgccgtcccggccgccgtctaccgccacctgtggagggaccgcgtatgccagctgtgccacccgtcgccggtccacgccgccgcccacctgagcctggagactctgaccgctttcgtgcttcctttcgggctgatgctcggctgctacagcgtgacgctggcacggctgcggggcgcccgctggggctccgggcggcacggggcgcgggtgggccggctggtgagcgccatcgtgcttccttcggcttgctctgggccccctaccacgcagtcaaccttctgcaggcggtcgcagcgctggctccaccggaaggggccttggcgaagctgggcggagccggccaggcggcgcgagcgggaactacggccttggccttcttcagttctagcgtcaacccggtgctctacgtcttcaccgctggagatctgctgccccgggcaggtccccgtttcctcacgcggctcttcgaaggctctggggaggcccgagggg

SEQ ID NO: 198 - DNA, 3282 bp, Homo sapiens
cccacgcgtccgacttaaaagagaagctttagctgccaaagattgggaaagggaaaggacaaaaaagacccctgggctacacggcgtaggtgcagggtttcctactgctgttcttttatgctgggagctgtggctgtaaccaactaggaaataacgtatgcagcagctatggctgtcagagagttgtgcttcccaagacaaaggcaagtcctgtttctttttcttttttggggagtgtccttggcaggttctgggtttggacgttattcggtgactgaggaaacagagaaaggatcctttgtggtcaatctggcaaaggatctgggactagcagagggggagctggctgcaaggggaaccagggtggtttccgatgataacaaacaatacctgctcctggattcacataccgggaatttgctcacaaatgagaaactggaccgagagaagctgtgtggccctaaagagccctgtatgctgtatttccaaattttaatggatgatccctttcagatttaccgggctgagctgagagtcagggatataaatgatcacgcgccagtatttcaggacaaagaaacagtcttaaaaatatcagaaaatacagctgaagggacagcatttagactagaaagagcacaggatccagatggaggacttaacggtatccaaaactacacgatcagccccaactcttttttccatattaatattagtggcggtgatgaaggcatgatatatccagagctagtgttggacaaagcactggatcgggaggagcagggagagctcagcttaaccctcacagcgctggatggtgggtctccatccaggtctgggacctctactgtacgcatcgttgtcttggacgtcaatgacaatgccccacagtttgcccaggctctgtatgagacccaggctccagaaaacagccccattgggttccttattgttaaggtatgggcagaagatgtagactctggagtcaacgcggaagtatcctattcattttttgatgcctcagaaaatattcgaacaacctttcaaatcaatcctttttctggggaaatctttctcagagaattgcttgattatgagttagtaaattcttacaaaataaatatacaggcaatggacggtggaggcctttctgcaagatgtagggttttagtggaagtattggacaccaatgacaatccccctgaactgatcgtatcatcattttccaactctgttgctgagaattctcctgagacgccgctggctgtttttaagattaatgacagagactctggagaaaatggaaagatggtttgctacattcaagagaatctgccattcctactaaaaccttctgtggagaatttttacatcctaattacagaaggcgcgctggacagagagatcagagccgagtacaacatcactatcaccgtcactgacttggggacacccaggctgaaaaccgagcacaacataaccgtgctggtctccgacgtcaataacaacgcccccgccttcacccaaacctcctacaccctgttcgtccgcgagaacaacagccccgccctgcacatcggcagcgtcagcgccacagacagagactcgggcaccaacgcccaggtcacctactcgctgctgccgccccaagacccgcacctgcccctcgcctccctggtctccatcaacgcggacaacggccacctgttcgccctcaggtcgctggactacgaggccctgcaggctttcgagttccgcgtgggcgccacagaccgcggctcccccgcgctgaacagcgaggcgctgggtgcgcgtgctggtgctggacgccaacgacaactcgcccttcgtgctgtacccgctgcagaacggctccgcgccctgcaccgagctggtgccccgggcggccgagccgggctacctggtgaccaaggtggtggcggtggacggcgactcgggccagaacgcctggctgtcgtaccagctgctcaaggccacggagcccgggctgttcggtgtgtgggcgcacaatggggaggtgcgcaccgccaggctgctgagcgagcgcgacgcagccaagcacaggctggtggtgcttgtcaaggacaatggcgagcctcctcgctcggccaccgccacgctgcacgtgctcctggtggacggcttctcccagccctacctgcctctcccggaggcggccccggcccaggcccaggccgacttgctcaccgtctacctggtggtggcgttggcctcggtgtcttcgctcttcctcctctcggtgctcctgttcgtggcggtgcggctgtgcaggaggagcagggcggcctcggtgggtcgctgctcggtgcccgagggtccttttccagggcatctggtggacgtgaggggcgctgagaccctgtcccagagctaccagtatgaggtgtgtctgacgggaggccccgggaccagtgagttcaagttcttgaaaccagttatttcggatattcaggcacagggccctgggaggaagggtgaagaaaattccaccttccgaaatagctttggatttaatattcagtaaagtctgtttttagtttcatatacttttggtgtgttacatagccatgtttctattagtttacttttaaatctcaaatttaagttattatgcaacttcaagcattattttcaagtagtatacccctgtggttttacaatgtttcatcatttttttgcattaataacaactgggtttaatttaatgagtatttttttctaaatgatagtgttaaggttttaattctttccaactgcccaaggaattaattactattatatctcattacagaaatctgaggttttgattcatttcagagcttgcatctcatgattctaatcacttctgtctatagtgtacttgctctatttaagaaggcatatctacatttccaaactcattctaacattctatatattcgtgtttgaaaaccatgtcatttatttctacatcatgtatttaaaaagaaatatttctctactactatgctcatgacaaaatgaaacaaagcatattgtgagcaatactgaacatcaataatacccttagtttatatacttattattttatctttaagcatgctacttttacttggccaatattttcttatgttaacttttgctgatgtataaaacagactatgccttataattgaaataaaattataatctgcctgaaaatgaataaaaataaaacattttgaaatttgtgaaaaaaaaaaaaaaaaaaaaaaaaaaaaa

SEQ ID NO: 199 - DNA, 1218 bp, Homo sapiens
ccacgcgtccgatctgtctttttgcttttagcatcctaatgagtatgaaatgctatcttgtggttttgatttgcattcccctgatggcaactgatgctgagtgtcttttcctgtgcttacgggccatgcgtatttctttggagaaaggtctatccaggtcctttgcctatttttaattgagttgtcttttttttttaagttttctgttttcctaaccactagactaccagggatgagccttctttttattattgagttgggtgagctatttgtatattctagacgccagtcttttatcaggtatatgactggtaaaaatgttctccccttctgtggattgttttcagtttcttgttggtgtcctttgagacacaaaactttttaactttgatgatttccaagatacgtattttttttctattgtcacttgtgcttttggtgccatatctagaaaaccattgcctaatccaaggtcaagaagattaatgcctgtgttttcttctaagaacttgtatagttttagttctcacaatggtctttgatccatttcgagtatatttttatatatgatgtgatgtaggggtccagcttcattcttttgcttgtggatctccacttgtcccactgctgattattgagaaaaatatcctttctccacggaattgtcttggcatccttgctaaaggcctctgcttcttactggatcttctttcctgggacatggtgtcgttgggaagcttacctttttttttttttacttagtctgtgtttggttccaccagttttatgctgcctttctactctgttcttgctgtctccctctttacctgagtcaacggtactgagtcctatctctctctgatgttccccagtcttccttggtgcatgttctagctccacacactagtccttggaggaaggttgagaccaatgatttcctgttatgagtcatgaggaaactgaatcacctagaagtggaataatgtgctcagggtcaccatagcccattagtggaaggaccaggactagacctttagtcttctgaggtccagccccttaggctgtctgtcatcactgtacccaagtgatgtcactaccaaggccaaatgatggtgggctaaattttaattctcaaaagtgtaggaggctaatattgtcttctaagttccaaaagaagatgtaataaaagtctgttaccttaaaaaaaaaaaaaaaagg

SEQ ID NO: 200 - DNA, 1440 bp, Homo sapiens
  misc_feature (323)..(323): n equals a,t,g, or c
  misc_feature (337)..(337): n equals a,t,g, or c
gcttccacacagtatgacagacctctagactagaagtacatgatgaaaatagttggtaattaagataaaattgatttaatttactttagtcctgaacattgaatacttgtcaggatgccattgcaataatggcatatatcggagccaaatggtcaaatgatacacagagccaggagcctagcagccttgtccagtttgatgctctataccaagcttgtccaaccagtggcctgcatatcacatgtggcccaggacggctttgaatatggcccaacacaaattcataaactttcttaaaacaatatgagcttatgaaattttyntcatgatatttttncttttttcttttttttttttttttaactcatyagctatcattagtgttaatgtattttatgtgtggcccaagacagttcttccaatgtggcccaggaaagccaaaagattggacacccctgctttataccctttacactgtcctcggtagagaaaaaaaaaatgcttcaaagaatcgctaattttaaagaagagtagatgataaaagttaccaaaacaaaccgaaaaatttattgtatttgggattttagaaaatccaactattaggaaccagaatttagtctgctacagtaggaaaacaatgtgaatattcacatcatcaagttgatgttacataaccttagaaagctactgctgaatcttttatatcaatggattctatttttaaatacttttcataataatcattattttatgacatgactataatattaaatctgttaggactagaagaatttttacctttttcaaggaaattgttagtagttcagcaaacagtttctactctgtgacataagcccaggaaagtgaagtctcttgaaaactttttttctctaaccttcattcttgatggcaagcaactatgtgcttagaacgatggttttcaactttggttgcaccttaactctgaaacttaaaaaaaagataccccctgagattctgatttaattggtgtggagtataatctgggccttgataggggtcagagctcttcaggtgattctaatgtgcatccgtgattgagaattgctagttaagaagctgtttaatgtccttaaagaagaaactaatttttctttctcggagttgtattcatcttcaacagatattacwtagtcataagagaaaaatataaaatcaggaaaagcgtatatagagttatgaaagaggggttatgaattataaacagttttatgattaagtccaatcgtttaattgttattgaaagatagtcttatatttttaagtcctattttgctatttaacccttgtttatacttttgttcagtgctttgctctcctggtgtcaccttcataataataattcaactttgatcaataaaataaacaatcttctggaaaaaaaaaaaaaaaaaactcgta

SEQ ID NO: 201 - DNA, 838 bp, Homo sapiens
  misc_feature (19)..(19): n equals a,t,g, or c
  misc_feature (22)..(22): n equals a,t,g, or c
  misc_feature (81)..(81): n equals a,t,g, or c
gaaattaccttcacttaanggnacaaaactggactccaccgcgttgcggccgctctaaactagtgratcccccgggctgcngaaattcggcacgagtcggcacgagtcggcacgagtgagaagtgattgaaacaaaacagatgagttaatgtgattgagaatgacaggcagatgaagggggactcaagctatgatggtccctggaatgagagggtagatgggtttttggtggcctgggcccttcctattcaccttcatggcccccgaaaggcttagctctcttcccaggggctgctcccaatgtcctaagatgcagtcatgagtggggcttggggatcggggtttgcgggggcactgtggtccatgggtctgtgtgcaagttcagtttggggaaactcatgggacatagatttttgtcctagagactcacatggtgagtggtagccattgatggcaaaaagttacccggacttgaaaagatcagacagagtgagtgctcaggaaaataaaacgatgaagccaagaaaaagatgaaactaaactagaatgattgtggctctcctttggtgtttgcaagaggggccttccctccgtttgactggtgaggccttcccactctcgggctggtagagggacttcttcctggcttttgggggcaccggctcccccatagattctcgggtgcatgagcacaagttctgggcagattttgcaaaatcctgaagttaaagcatcttctgcttagaataaggaaagcaagtgaatgtcacgtttgtcacactaagacagttaccatgaaaacaaccacaggcgaaaaaaaaaaaaaaaaaaaactcga

SEQ ID NO: 202 - DNA, 4386 bp, Homo sapiens
  misc_feature (3477)..(3477): n equals a,t,g, or c
gacctcgataacagttatcccctgattctgtggataaccgtattaccgcctttgagtgagctgataccgctcgccgcagccgaacgaccgagcgcagcgagtcagtgagcgaggaagcggaagagcgcccaatacgcaaaccgcctctccccgcgcgttggccgattcattaatgcagctggcacgacaggtttcccgactggaaagcgggcagtgagcgcaacgcaattaatgtgagttagctcactcattaggcaccccaggctttacactttatgcttccggctcgtatgttgtgtggaattgtgagcggataacaatttcacacaggaaacagctatgaccatgattacgccaagctcgaaattaaccctcactaaagggaacaaaagctggagctccaccgcggtggcggccgctctagaactagtggatcccccgggctgcaggaattcggcacgagcgacatggcgctgaggcggccaccgcgactccggctctgcgctcggctgcctgacttcttcctgctgctgcttttcaggggctgcctgataggggctgtaaatctcaaatccagcaatcgaaccccagtggtacaggaatttgaaagtgtggaactgtcttgcatcattacggattcgcagacaagtgaccccaggatcgagtggaagaaaattcaagatgaacaaaccacatatgtgttttttgacaacaaaattcagggagacttggcgggtcgtgcagaaatactggggaagacatccctgaagatctggaatgtgacacggagagactcagccctttatcgctgtgaggtcgttgctcgaaatgaccgcaaggaaattgatgagattgtgatcgagttaactgtgcaagtgaagccagtgacccctgtctgtagagtgccgaaggctgtaccagtaggcaagatggcaacactgcactgccaggagagtgagggccacccccggcctcactacagctggtatcgcaatgatgtaccactgcccacggattccagagccaatcccagatttcgcaattcttctttccacttaaactctgaaacaggcactttggtgttcactgctgttcacaaggacgactctgggcagtactactgcattgcttccaatgacgcaggctcagccaggtgtgaggagcaggagatggaagtctatgacctgaacattggcggaattattgggggggttctggttgtccttgctgtactggccctgatcacgttgggcatctgctgtgcatacagacgtggctacttcatcaacaataaacaggatggagaaagttacaagaacccagggaaaccagatggagttaactacatccgcactgacgaggagggcgacttcagacacaagtcatcgtttgtgatctgagacccgcggtgtggctgagagcgcacagagcgcacgtgcacatacctctgctagaaactcctgtcaaggcagcgagagctgatgcactcggacagagctagacactcattcagaagcttttcgttttggccaaagttgaccactactcttcttactctaacaagccacatgaatagaagaattttcctcaagatggacccggtaaatataaccacaaggaagcgaaactgggtgcgttcactgagttgggttcctaatctgtttctggcctgattcccgcatgagtattagggtgatcttaaagagtttgctcacgtaaacgcccgtgctgggccctgtgaagccagcatgttcaccactggtcgttcagcagccacgacagcaccatgtgagatggcgaggtggctggacagcaccagcagcgcatcccggcgggaacccagaaaaggcttcttacacagcagccttacttcatcggcccacagacaccaccgcagtttcttcttaaaggctctgctgatcggtgttgcagtgtccattgtggagaagctttttggatcagcattttgtaaaaacaaccaaaatcaggaaggtaaattggttgctggaagagggatcttgcctgaggaaccctgcttgtccaacagggtgtcaggatttaaggaaaaccttcgtcttaggctaagtctgaaatggtactgaaatatgcttttctatgggtcttgtttattttataaaattttacatctaaatttttgctaaggatgtattttgattattgaaaagaaaatttctatttaaactgtaaatatattgtcatacaatgttaaataacctatttttttaaaaaagttcaacttaaggtagaagttccaagctactagtgttaaattggaaaatatcaataattaagagtattttacccaaggaatcctctcatggaagtttactgtgatgttccttttctcacacaagttttagcctttttcacaagggaactcatactgtctacacatcagaccatagttgcttaggaaacctttaaaaattccagttaagcaatgttgaaatcagtttgcatctcttcaaaagaaacctctcaggttagctttgaactgcctcttcctgagatgactaggacagtcggtacccagaggccacccagaagccctcagatgtacatacacagatgccagtcagctcctggggttgcgccaggcgcccccgctctagctcactgttgcctcgctgtctgccaggaggccctgccatccttgggccctggcagtggctgtgtcccagtgagctttactcacgtggcccttgcttcatccagcacagctctcaggtgggcactgcagggacactggtgtcttccatgtagcgtcccagctttgggctcctgtaacagacctctttttggttatggatggctcacaaaatagggcccccaatgctatttttttttttttaagtttgtttaattatttgttaagattgtctaaggccaaaggcaattgcgaaatcaagtctgtcaagtacaataacatttttaaaagaaaatggatcccactgttcctctttgccacagagaaagcacccagacgccacaggctctgtcgcatttcaaaacaaaccatgatggagtggcggccagtccagccttttaaagaacgtcaggtggagcagccaggtgaaaggcctggcggggaggaaagtgaaacgcctgaatcaaaagcagttttctaattttgactttaaatttttcatccgccggagacactgctcccatttgtggggggacattagcaacatcactcagaagcctgtgttcttcaagagcaggtgttctcagcctcacatgccctgccgtgctggactcaggactgaagtgctgtaaagcaaggagctgctgagaaggagcactccactgtgtgcctggagaatggctctcactactcaccttgtctttcagcttccagtgtcttgggttttttatactttgacagcttttttttaattgcatacatgagactgtgttgactttttttagttatgtgaaacactttgccgcagnccgcctggcagaggcaggaaatgctccagcagtggctcagtgctccctggtgtctgctgcatggcatcctggatgcttagcatgcaagttccctccatcattgccaccttggtagagagggatggctccccaccctcagcgttggggattcacgctccagcctccttcttggttgtcatagtgatagggtagccttattgccccctcttcttataccctaaaaccttctacactagtgccatgggaaccaggtctgaaaaagtagagagaagtgaaagtagagtctgggaagtagctgcctataactgagactagacggaaaaggaatactcgtgtattttaagatatgaatgtgactcaagactcgaggccgatacgaggctgtgattctgcctttggatggatgttgctgtacacagatgctacagacttgtactaacacaccgtaatttggcatttgtttaacctcatttataaaagcttcaaaaaaacccaaaaaaaaaaaaaaaaaaaaatgaccctcgagggggggcccggtacccaattcgccctatagtgagtcgtattacaattcactggccgtcgttttacaacgtcgtgactgggaaaaccctggcgttacccaacttaatcgccttgcagcacatccccctttcgccagctggcgtaatagcgaagaggcccgcaccgatcgcccttcccaacagttgcgcagcctgaatggcgaatggcaaattgtaagcgttaatattttgttaaaattcgcgttaaatttttgttaaatcagctcattttttaaccaataggccgaaatcggcaaaatcccttataaatcaaaagaatagaccgagatagggttgagtgttgttccagtttggaacaagagtccacgattaaagaatgttatcg

SEQ ID NO: 203 - DNA, 1635 bp, Homo sapiens
  misc_feature (85)..(85): n equals a,t,g, or c
tcgacccacgcgtccgcagctctccgtggacaatgggctgtggcgtgtgaccctgtgcatgctggccttcccgctgctcctcacnggcctcatctccttcagggagaagaggctgcaggatgtgggcacccccgcggcccgcgcccgtgccttcttcaccgcacccgtggtggtcttccacctgaacatcctctcctacttcgccttcctctgcctgttcgcctacgtgctcatggtggacttccagcctgtgccctcctggtgcgagtgtgccatctacctctggctcttctccttggtgtgcgaggagatgcggcagctcttctatgaccctgacgagtgcgggctgatgaagaaggcagccttgtacttcagtgacttctggaataagctggacgtcggcgcaatcttgctcttcgtggcagggctgacctgcaggctcatcccggcgacgctgtaccccgggcgcgtcatcctctctctggacttcatcctgttctgcctccggctcatgcacatttttaccatcagtaagacgctggggcccaagatcatcattgtgaagcggatgatgaaggacgtcttcttcttcctcttcctgctggctgtgtgggtggtgtccttcggggtggccaagcaggccatcctcatccacaacgagcgccgggtggactggctgttccgargggccgtctaccactcctacctcaccatcttcgggcagatcccgggctacatcgacggtgtgaacttcaacccggagcactgcagccccaatggcaccgacccctacaagcctaagtgccccgagagcgacgcgacgcagcagaggccggccttccctgagtggctgacggtcctcctactctgcctctacctgctcttcaccaacatcctgctgctcaacctcctcatcgccatgttcaactacaccttccagcaggtgcaggagcacacggaccagatttggaagttccagcgccatgacctgatcgaggartaccacggccgccccgccgcgccgccccccttcatcctcctcagccacctgcagctcttcatcaagagggtggtcctgaagactccggccaagaggcacaagcagctcaagaacaagctggagaagaacgaggaggcggccctgctatcctgggagatctacctgaaggagaactacctccagaaccgacagttccagcaaaagcagcggcccgagcagaagatcgaggacatcagcaataaggttgacgccatggtggacctgctggacctggacccactgaagaggtcgggctccatggagcagaggttggcctccctggaggagcaggtggcccagacagcccgagccctgcactggatcgtgaggacgctgcgggccagcggcttcagctcggaggcggacgtccccactctggcctcccagaaggccgcggaggagccggatgctgagccgggaggcaggaagaagacggaggagccgggcgacagctaccacgtgaatgcccggcacctcctctaccccaactgccctgtcacgcgcttccccgtgcccaacgagaaggtgccctgggagacggagttcctgatctatgacccacccttttacacggcagagaggaaggacgcggccgc

SEQ ID NO: 204 - DNA, 1835 bp, Homo sapiens
ggcacgagagccgccctgggtgtcagcggctcggctcccgcgcacgctccggccgtcgcgcagcctcggcacctgcaggtccgtgcgtcccgcggctggcgcccctgactccgtcccggccagggagggccatgatttccctcccggggcccctggtgaccaacttgctgcggtttttgttcctggggctgagtgccctcgcgcccccctcgcgggcccagctgcaactgcacttgcccgccaaccggttgcaggcggtggagggaggggaagtggtgcttccagcgtggtacaccttgcacggggaggtgtcttcatcccagccatgggaggtgccctttgtgatgtggttcttcaaacagaaagaaaaggaggatcaggtgttgtcctacatcaatggggtcacaacaagcaaacctggagtatccttggtctactccatgccctcccggaacctgtccctgcggctggagggtctccaggagaaagactctggcccctacagctgctccgtgaatgtgcaagacaaacaaggcaaatctaggggccacagcatcaaaaccttagaactcaatgtactggttcctccagctcctccatcctgccgtctccagggtgtgccccatgtgggggcaaacgtgaccctgagctgccagtctccaaggagtaagcccgctgtccaataccagtgggatcggcagcttccatccttccagactttctttgcaccagcattagatgtcatccgtgggtctttaagcctcaccaacctttcgtcttccatggctggagtctatgtctgcaaggcccacaatgaggtgggcactgcccaatgtaatgtgacgctggaagtgagcacagggcctggagctgcagtggttgctggagctgttgtgggtaccctggttggactggggttgctggctgggctggtcctcttgtaccaccgccggggcaaggccctggaggagccagccaatgatatcaaggaggatgccattgctccccggaccctgccctggcccaagagctcagacacaatctccaagaatgggaccctttcctctgtcacctccgcacgagccctccggccaccccatggccctcccaggcctggtgcattgacccccacgcccagtctctccagccaggccctgccctcaccaagactgcccacgacagatggggcccaccctcaaccaatatcccccatccctggtggggtttcttcctctggcttgagccgcatgggtgctgtgcctgtgatggtgcctgcccagagtcaagctggctctctggtatgatgaccccaccactcattggctaaaggatttggggtctctccttcctataagggtcacctctagcacagaggcctgagtcatgggaaagagtcacactcctgacccttagtactctgcccccacctctctttactgtgggaaaaccatctcagtaagacctaagtgtccaggagacagaaggagaagaggaagtggatctggaattgggaggagcctccacccacccctgactcctccttatgaagccagctgctgaaattagctactcaccaagagtgaggggcagagacttccagtcactgagtctcccaggcccccttgatctgtaccccacccctatctaacaccacccttggctcccactccagctccctgtattgatataacctgtcaggctggcttggttaggttttactggggcagaggatagggaatctcttattaaaactaacatgaaatatgtgttgttttcatttgcaaatttaaataaagatacataatgtttgtatgaaaaaaaaaaaaaaaaaaaaa

SEQ ID NO: 205 - DNA, 2441 bp, Homo sapiens
  misc_feature (2408)..(2409): n equals a,t,g, or c
  misc_feature (2435)..(2435): n equals a,t,g, or c
  misc_feature (2438)..(2438): n equals a,t,g, or c
gggtttctccatagcataaatgaaaaaaaaaaaaaaaaaagtaaacagggcagtgtgtgctttttcttttctcccccctcaactatattaagaactcctagtttcaccctttctccatcccatcatcccacctatctgtggttgcttcccaagacctcctcccaagatagacatctcctacccagtgcccttgtgtgaccccaggactcaagtctcagactgtgaacagatgtggccatgcccagagacgccagcctggccagaagggcatgcctcagcttactacttcatctctcctggttccctccctgcagtgccccgggtgtcatcttctcccactctgggtaccagggattctaccacataggcttcccaaagccccattctaactcccctctctcagggaagccctagagagaggtccaaaaagcattcacagctgtatcacactctatgcaggtggggtaggagactgatcaggcctgctgtggggaagcagtatgtatgaacacagccagaaatgtcatagtccaaacaggatgctttcaggccatctcagctgcttgatggtgagatggttcccttattccttcaggaaaggcttagcattgggccacataggggaagcagctttgaacaaatcagtcatagcactgcctatagcattagccagtgaccaaattagggacaacktcttggcacagaattgcttatcaaggaacatttccacaagaaagaaaatattaaggggttatttccacagargcccaaaacgtcttggaaacacagaggtgaggaggaggaatagtaattgtcaatgagcttttaataccaagatacaccccctgcccccaaagaagagtcctcttttagggaatcagaaccttcattgtcctagaagctgaaagattcttggaacattttagcttttactctcaacttgctgttctctttacattccttaagttagactttcgggtgtggcttctctcccaggggtaacatttacttccattttctagaccgaaccaaaagtcttctgcagaatctcccaccgagtgtggtaagaaggaaggacaaaaggctttaggatataaatttcatgttacagagcatgtcaytgtcaaaggaaatctgtggccctgagattttaagaacataaaatgtgacatttgatatttctccagcccagggaagtaagatggttagcaatggttgccttaatcaaatggtcccatttttaaccccaaaggaagtgcccacagcaagaggtttgtgtgatgcacttatgtcctccggtgaggaaagggggccacatatgaaaggccccttaggtcagatcctgagagtagcacatttgagtgcagattcctgggccccacctcaaacctactaattctgaatctctgggaatagggccaggaaatctgccctttctacaaactacccaagttgttctgttgcacatcaatgtttgggaaccactgctgtaagggaatcattctggtcaccttgagctttgagctaccactaagccatgaaagaaaatacatcatacagggaagagagaagggaggaggttccaagtagtaactggcagatcctcctgtctggaggtaccaccttctattctggtttctgacttttccttcttgatgaccatagatgtgttccagaggcaaaagagacacattatcccagatggcagaacatgctttcaaaacatataaaatgtcaaagttccagatccttctacatctttagtcctgtctgaggatggtagctggctctctgtagctgatagatggctagagttccatccaaatccttgaccacgacttcatggagatttgaataatctatttgatgagatttctatttcaataacccacctctctcaccccacattcatatccctaaatttgaccctctgggccgagtcacattaccttcaggagacttgatcccagtagactgaggtcttccctttcagcagaaagatttcatttccctggcttgccagtggcactgatttccgaacacccaatgagtttaatattctttcctccttggcattactgccccagcctctttttattttttttgtgtgtgtctaataaccaggaaaaaaataaagcttaggttttaaaaagttttaaaaataatctgtttcagaaactgtcaaatgtaccatatttgtattaagagttgttgggaatttttgtacaatgaatttacatttatttatggtgacatatttacgcttgtgatcaaataatgatgttaaattcttaaatcatatttgctatgcagctgaagatgatattttgatttgtattttgggggtacctgtgttgagttgataaacatttccatcttcattaaaactgcttccaaactagtaaaannaaaaaaaaaaaaaaaaaaaggggggnccnccc

SEQ ID NO: 206 - DNA, 718 bp, Homo sapiens
  misc_feature (21)..(21): n equals a,t,g, or c
aactagggatcccccgggctncaggaattcgccactggrgccaaagtgagagtccagcggtcttccagcgcttgggccacggcggcggccctgggagcagaggtggagcgaccccattacgctaaagatgaaaggctggggttggctggccctgcttctgggggccctgctgggaaccgcctgggctcggaggagccaggatctccactgtggagcatgcagggctctggtggatgaactagaatgggaaattgcccaggtggaccccaagaagaccattcagatgggatctttccggatcaatccagatggcagccagtcagtggtggaggtaactgttactgttcccccaaacaaagtagctcactctggctttggatgaaattcgactgcttaaaaaggaccttggtttaatagaaatgaagaaaacagactcagaaaaaagatttggctctgtctcatttggaagaagctgcaggcttattccccatgcacttgcttcctggctgcaaaccttaatactttgtttctgctgtagaatttgttagcaaacagggagtcctgatcagcacccttctccacatccacatgactggtttttaatgtagcactgtggtatacatgcaaacatccgttcaaaatctgagtcggagctaaaaaaaaaaaaaaaaaaactcragggggggcccgagtacccaattsgccctagaagaggcga

SEQ ID NO: 207 - DNA, 1380 bp, Homo sapiens
cagacccgcggggcaaacggactggggccaagagccgggagcgcgggcgcaaaggcaccagggcccgcccagggcgccgcgcacacggccttgggggttctgcgggccttcgggtgcgcgtctcgcctctagccatggggtccgcagcgttggagatcctgggcctggtgctgtgcctggtgggctgggggggtctgatcctggcgtgcgggctgcccatgtggcaggtgaccgccttcctggaccacaacatcgtgacggcgcagaccacctggaaggggctgtggatgtcgtgcgtggtgcagagcacgggcacatgcagtgcaaagtgtacgactcggtgctggctctgagcaccgaggtgcaggcggcgcgggcgctcaccgtgagcgccgtgctgctggcgttcgttgcgctcttcgtgaccctggcgggcgcgcagtgcaccacctgcgtggccccgggcccggccaaggcgcgtgtggccctcacgggaggcgtgctctacctgttttgcgggctgctggcgctcgtgccactctgctggttcgccaacattgtcgtccgcgagttttacgacccgtctgtgcccgtgtcgcagaagtacgagctgggcgcacgctgtacatcggctgggcggccaccgcgctgctcatggtaggcggctgcctcttgtgctgcggcgcctgggtctgcaccggccgtcccgacctcagcttccccgtgaagtactcagcgccgcggcggcccacggccaccggcgactacgacaagaagaactacgtctgagggcgctgggcacggccgggcccctcctgccagccacgcctgcgaggcgttggataagcctggggagccccgcatggaccgcggcttccgccgggtagcgcggcgcgcaggctcctcggaacgtccggctctgcgccccgacgcggctcctggatccgctcctgcctgcgcccgcagctgaccttctcctgccactagcccggccctgcccttaacagacggaatgaagtttccttttctgtgcgcggcgctgtttccataggcagagcgggtgtcagactgaggatttcgcttcccctccaagacgctgggggtcttggctgctgccttacttcccagaggctcctgctgacttcggaggggcggatgcagagcccagggcccccaccggaagatgtgtacacctggtctttactccatcggcagggcccgagcccagggaccagtgacttggcctggacctcccggtctcactccagcatctccccaggcaaggcttgtgggcaccggagcttgagagagggcgggagtgggaaggctaagaatctgcttagtaaatggtttgaactctcaaaaaaaaaaaaaaaaaaa

SEQ ID NO: 208 - DNA, 824 bp, Homo sapiens
gggacgcgccgtggacccgcgtgcggacggcggggacaggctccggtgctgagcgcctccggtgtccccagcagcactgacccacttgcaggccccggagctgagccgccagccatggccgctccccgcgggagggccgcgccctggacgacggccctgctgctgctcctagcctcgcaggtcctgtctccgggaagctgcgcggacgaggaggaggtccccgaggagtgggtgctcctgcacgtcgtccagggccagataggcgccgggaactacagctacctgcggctgaaccacgagggcaagatagtcctcaggatgcgcagcctcaagggagatgcggatctgtacgtctccgccagcagcctgcaccccagcttcgacgactacgagctgcaatcggccacctgcggcccggacgccgtgtccatccccgcgcacttccggcgcccagtgggcatcggcgtctatggacacccctcccacctggagagcgagttcgagatgaaggtgtactacgacggcacggtcgarcagcacccgttcggcgaggccgcctaccccgccgacgggcagatgccggscagaagcacgctggtgccccggaagacgcctcgcaagargargaatctgttctctggacratattaattagcattttgaaactggtacttgaaattctcttttgagtcgttgaccacactctgggatataaaaccctccatctgtgaagctgattgcagtttgctgtgaaccttgctacttgtacttggttgaagttctaggtacctttagtcaagggatggaaaaataaagccatacgc

SEQ ID NO: 209 - DNA, 3941 bp, Homo sapiens
aattcggcacgaggtgtgtgtgtatgtatgtatgtatgtccccttaccccatttcattcttggcccatgcttgctcttccttttttaccactgttatttacttatttctatagcatgagtgaacgtcattttgtaacagtcaagaccgtgacgttcggatgccctccctcccctggtaattttaagtgcagtgaaccctttttcctttgtcatttccatgtgtaaccaaatatgtctaaaattcagacaccttcactggaccatgcatgtttttaatctgaaagatcagtagtactcagagtgttcgtgtattttttaagtgactgcaattttttttttgcttgtctgaaaacttatttttcccttttataattttacattttatagtgaatctttctaagtatagattcttttattagacatgcaaagagaataatcacacaactaagttttccacaaacgtttatgtacacgccaatgtatgcatgagacatctttcaattaaaaatgtttaaactgatttttttttaaataccactataccaatgaggataagctgattttttaacttagattttatagctctagttttgcagttttggaaaatagcaggttttaaacaaaattaatatatgagctatttaaaatggtctttttagagtaagtcttacacataatggtcatttgctacttggattttcttgtccaattaatagtgacatttgacattgtatttagtctttccttccattcattaaacaaatcttactgtgcatgtagggagtatagaatgctacatttaatcttacgagatcatgctgtttaccaaattttatgatgaaattaatgctttcttcagtaggcagtcttacattgtaggcagactcctgtcaagttttgtctttcaaaatggtcctcattagcaagttaccaaaagtaaaaatagggcaataaagtaacagaattccttttaaacccatagtaagctcttctggcatgaatttatagccctcttctacccttccagccaaaggtcattccaaatgctatatgtggaatttgtctgaagggtaaggagtccaacaagaaaggaaaggctgaatcacttatacactgctcccaatgtgagaatagtggtaagtattgaaatgtctttttaaaattttaaccaccgtatttattggttcaaaaactagaatttatagtttcaggcagatttcaaccaaagagtcaccaaattaaatacacagggtagcttgtgaggcatagacacagcccatgtgttttcctctacattgtatattcatttctctttggcgatttgacattatagccattctctggaagtcctaaagcaaactagtattttatgtgccatattaagttaaaatttcttatgtgagataccactaatactggttttgatttaggccatccttcttgcctggatatgacaatggagcttgtttctatgattaagacctacccatggcagtgtatggaatgtaaaacatgcattatatgtggacaaccccaccatgaagaagaaatgatgttctgtgatatgtgtgacagaggttatcatactttttgtgtgggccttggtgctattccatcaggtaaagattaaaaaaagagcaaacattatctttgggtgatgagactctcccagcactccaaaaggctgcataaacgctatcatgacatgaagagcttgtggactcttatgtgcaaatatgaccaaagctgtgattatacaggtcatgtccaccagcttttcatccctagmcaattccaactaaaggataagtgaaaggccagaatgcccctgctaagttttggaagtatagttctatagaatgagctggtgtttttctactgaaatactaaagtaacaaagcctttatttttatatgttatctatttagaaacaacaaaatgactgctacgtctttatacatttctatagaaatctattatagatttctgtaaattgaggcagcatgacaattccagataactttagaacagagttgaataaatcacagtaattggactaaaacattacacagataattgtgtaattttagaacttacttgcatagttaacactgtataatactcttataaaatatatgcctacaacgaagtttcctgggaatcattaagcaagcaacataattatttttctgtagtaattcagatcaagtatgtagtacaagttatcattgtgctgttaaagttttaaagtgctgtcagcagagtacaccaggacttgaaagaatgctgttaagacacacagctgccagtgagcaggagagaaaaagtcttaaaaaagccaaattccggaatgggttttgaccttttgaagtatgatagtgtttgaatttcaggaaagattgtactttcttaaaggtccgtatcaccgtatggcattgcatctctcccatcccccttgacttgcaatgaattttgcatggcattgattacattgattaagtttacattttttccttaaattaaggaactcatagtgcccttctcaccacaaaatccagagaggaatatcattagtgatagctaaggcagaagagtttagatgggcttaaaattcagtcctgtaaagataatttttcattctatattaacaatttttttcctaggtcgctggatttgtgactgttgtcagcgggcccccccaacacccaggaaagtgggcagaagggggaaaaacagcaaagagggataaaatagtttttgactctaatactgtatatgcatttaagtggaatatttggtgccatttacaacattattttcatgccaataaaagattttttttgcaaattatgagcttaaaatctgcagttatttctgttaaaagctacgcttactctcgaaactaactccaggtagagaattcatcttccaaagtattttatagtaaccttggctcactccaaaaattcagtggaaatgtttagtaacttaagatacttaactgtttctccatagccccaaaagttaattttcatgaaacttcctaatctacattgtttccggcctaccataggtagcactgacaaagttatttaataactgaagaattttcataggtatgacaaatggcccactaagatttggtgcagctggatttagagttgtcattattggactggtacaggaacaaactttgtaaatacctgcctgcccaggaaatcctttttgtatagaaaagtaccatcacctacttggggtacaggcatgaggctttagtccaggctcagggaagtgtacgtaaatcatttccaacttgattttagtaactcttgaaaacttacaccaacttcggttagaatctccagagtaaaattacaaagttatcaaccttttgatttgtgtcacagcatgaaaggttgctctattttatataaacctgttactgcaatcatttttagtcaacctgcctaatgaaaatggagtctaaacactttgtgcacagtccttttataggaattatgatctttaaaatactgtgcttgctgcttttcctatttttggggtaactgaggtaacaaaactgcgtatggctttatttttccatcccttgactaaaggtacctagaacttcaaccaagtacaagtagcaaggttcacagcaaactgcaatcagcttcacagatggagggttttatatcccagagtgtggtcaacgactcaaaagagaatttcaagtaccagtttcaaaatgctaattaatatcgtccagagaacagattcctcctcttgcgaggcgtcttccggggcaccagcgtgcttctggccggcatctgcccgtcggcggggtaggcggcctcgccgaacgggtgctgctcgaccgtgccgtggtagtacaccttcatatcgaggtgggtctcccagagaaggaggggacccccccc

SEQ ID NO: 210 - DNA, 526 bp, Homo sapiens
  misc_feature (283)..(283): n equals a,t,g, or c
ggggacgtgcacggggccgccctcctggccctgaagctgcgccggcctccctgagcgtttcgctgcggagggaagtccactctcggggagagatgctgatgccggtccacttcctgctgctcctgctgctgctcctggggggccccaggacaggcctcccccacaagttctacaaagccaagcccatcttcagctgcctcaacaccgccctgtctgaggctgagaagggccagtgggaggatgcatccctgctgagcaagaggagcttccactacctgcgcanaagsacgcctcttcgggagaggaggaggagggcaaagagaaaaagactttccccatctctggggccaggggtggarccagaggcacccggtacagatacgtgtcccaagcacagcccaggggaaagccacgccaggacacggccaagagtccccaccgcaccaagttcaccctgtccctcgacgtccccaccaacatcatgaacctcctcttcaacatcgccaaggccaagaactgcgtgccc

SEQ ID NO: 211 - DNA, 571 bp, Homo sapiens
  misc_feature (460)..(460): n equals a,t,g, or c
  misc_feature (494)..(494): n equals a,t,g, or c
  misc_feature (562)..(562): n equals a,t,g, or c
  misc_feature (566)..(566): n equals a,t,g, or c
gcaacatcgtccttactcctgcatttttctgacgggcatgctcccacgcagcttgcgcaacaccaagcgggcggtcaaactctcggctcaattgttataagatcacataacaaaactttcatcctggagctctctcatgcgccgtttgctgctcgctttgccgtttgccctgctgccactggctgtcgctcatgctcacgaagaccatgaccacgagcacggcagcctcggcgcccatgaacatggcgtcgggcgcctgaatgccgtgctggacggccaggccctggagctggaactggacagcccggccatgaacctggtgggtttcgagcatgtagccaccagcgccgccgacaaagccaaggtcgccgccgtgcgcaaacagctggaaaatccatcgggccctgttcaacctgcccaaagccgcagttgtgtggtcagcaaccaaggaatcaacagncgttgttcgtgacaaaccggaagccgagcatgangacgatgaccaagcctccgacgggaaaaggcggcggcggcccacaaagcatgatcaagaccaaaatgnaatncacgc

SEQ ID NO: 212 - DNA, 2078 bp, Homo sapiens
  misc_feature (1177)..(1177): n equals a,t,g, or c
  misc_feature (1187)..(1187): n equals a,t,g, or c
  misc_feature (2057)..(2057): n equals a,t,g, or c
ggcacgaggagttgtgcagatacctggctgagagctggctcaccttccagattcacctgcaggagctgctgcagtacaagaggcagaatccagctcagttctgcgttcgagtctgctctggctgtgctgtgttggctgtgttgggacactatgttccagggattatgatttcctacattgtcttgttgagtatcctgctgtggcccctggtggtttatcatgagctgatccagaggatgtacactcgcctggagcccctgctcatgcagctggactacagcatgaaggcagaagccaatgcyctgcatcacaaacacgacaagaggaagcgtcaggggaagaatgcacccccaggaggtgatgagccactggmagagacagagagtgaaagcgaggcagagctggctggcttctccccagtggtggatgtgaagaaaacagcattggccttggccatttacagactcagagctgtcagatgaggaggcttctatcttggagagtggtggcttctccgtatcccgggccacaactccgcagctgactgatgtctccgaggatttggaccagcagagcctgccaagtgaaccagaggagaccctaagccgggacctaggggagggagaggagggagagctggcccctcccgaagacctactaggccgtcctcaagctctgtcaaggcaagccctggactcggaggaagaggaagaggatgtggcagctaaggaaaccttgttgcggctctcatcccccctccactttgtgaacacgcacttcaatggggcagggtccccccmagatggagtgaaatgctcccctggaggaccagtggagacactgagccccgagacagtgagtggtggcctcactgctctgcccggcaccctgtcacctccactttgccttgttggaagtgacccagccccctccccttccattctcccacctgttccccaggactcaccccagcccctgcctgcccctgaggaagaagaggcactcaccactgaggactttgagttgctggatcagggggagctggagcagctgaatgcagagctgggcttggagccagagacaccgccaaaaccccctgatgctccacccctggggcccgacatccattctytggtacatcagaccaagaagctcaggccgtggcagagccatgagnccagccgttnaggaaggagctgcaggcacagtagggcttcttggctaggagtgttgctgtttcctcctttgcctaccactctggggtggggcagtgtgtggggaagctggctgtcggatggtagctattccaccctctgcctgcctgcctgcctgctgtcctgggcatggtgcagtacctgtgcctaggattggttttaaatttgtaaataattttccatttgggttagtggatgtgaacagggctagggaagtccttcccacagcctgcgcttgcctccctgcctcatctctattctcattccactatgccccaagccctggtggtctggccctttctttttcctcctatcctcagggacctgtgctgctctgccctcatgtcccacttggttgtttagttgaggcactttataatttttctcttgtcttgtgttcctttctgctttatttccctgctgtgtcctgtccttagcagctcaaccccatcctttgccagctcctcctatcccgtgggcactggccaagctttagggaggctcctggtctgggaagtaaagagtaaacctggggcagtgggtcaggccagtagttacactcttaggtcactgtagtctgtgtaaccttcactgcatccttgccccattcagcccggcctttcatgatgcaggagagcagggatcccgcagtacatggcgccagcactggagttggtgagcatgtgctctctcttgagattaggagcttccttactgctcctctgggtgatccaagtgtagtgggaccccctactagggtcaggaagtggacactaacatctgtgcaggtgttgacttgaaaaataaagtgttgattggctagaaaaaaaaaaaaaaaaattnctgcggtccgcaagggaattc

SEQ ID NO: 213 - DNA, 2190 bp, Homo sapiens
tcgacccacgcgtccgggcctgcctctccactcagagggacatcagctcaagagcaatcacacaaccccagagaagaaatccaaacctcaccttctgttgctgcttctctactatcttatgggtgcttgactggctctcccaagcctgctgtcctgcagcctcactgcctgtgtccttttctcaggcagtgtgctggcgttccatgcgacgtggctgtgcagtgctgggagccctggggctgctggccggtgcaggtgttggctcatggctcctagtgctgtatctgtgtcctgctgcctctcagcccatttccgggaccttgcaggatgaggagataactttgagctgctcagaggccagcgctgaggaagctctgctccctgcacttcccaaaacagtatctttcagaataaacagcgaagacttcttgctggaagcgcaagtgagggatcagccacgctggctcctggtctgccatgagggctggagccccgccctggggctgcagatctgctggagccttgggcatctcagactcactcaccacaagggagtaaacctcactgacatcaaactcaacagttcccaggagtttgctcagctctctcctagactgggaggcttcctggaggaggcgtggcagcccaggaacaactgcacttctggtcaagttgtttccctcagatgctctgagtgtggagcgaggcccctggcttcccggatagttggtgggcagtctgtggctcctgggcgctggccgtggcaggccagcgtggccctgggcttccggcacacgtgtgggggctctgtgctagcgccacgctgggtggtgactgctgcacattgtatgcacagtttcaggctggcccgcctgtccagctggcgggttcatgcggggctggtcagccacagtgccgtcaggccccaccaaggggctctggtggagaggattatcccacaccccctctacagtgcccagaatcatgactacgacgtcgccctcctgaggctccagaccgctctcaacttctcagacactgtgggcgctgtgtgcctgccggccaaggaacagcattttccgaagggctcgcggtgctgggtgtctggctggggccacacccaccctagccatacttacagctcggatatgctccaggacacggtggtgcccttgttcagcactcagctctgcaacagctcttgcgtgtacagcggagccctcaccccccgcatgctttgcgctggctacctggacggaagggctgatgcatgccagggagatagcgggggccccctagtgtgcccagatggggacacatggcgcctagtgggggtggtcagctgggggcgtggctgcgcagagcccaatcacccaggtgtctacgccaaggtagctgagtttctggactggatccatgacactgctcaggactccctcctctgagtcctgctgtttcctccagtctcactgcacaccactgcctcatgcttcctggggcctccagcagctccactaatggaggagaggcagtagcttccgacacagaacgcatggacctcctactactgtgtgtgaggaacagtcactacccactggccagccacccagccaacaggtctctcctcttgggccctgatttcagagtcctctttctcactagagactcaatgacagaagagaggctgggacttggttgggcatgctgtggttgatgagggatgagggggaggagagaggtaggagctggagatgaagaggctgctagaagcagcaggaagcctgcccttctgccctctcccttccctgcccctgtgtgagtcttttgggagggtgctgggaggtgccccccgtcccacctttttcctgtgctctaggtgggctaagtgcctccctagaggactccatggctgagaggctcctgggcagatggggtcaaggctgggccagcccagatgaagcctatgggagtcaggaccctctccactctccctctccactccccttcctgttctcacctggctgtggctggccctgtgtggggtgggtacactggaaaacaagaaggttggagttggtctaggacattggttttaaatgacagttctgtgaactggtccaaggagttctgttattaaagtgatatatggtcttggtccaaaaaaaaaaaaaaaaaaaaaaaaaaaaaaaa

SEQ ID NO: 214 - DNA, 4909 bp, Homo sapiens
  misc_feature (2488)..(2488): n equals a,t,g, or c
  misc_feature (2493)..(2493): n equals a,t,g, or c
  misc_feature (2512)..(2512): n equals a,t,g, or c
  misc_feature (2523)..(2523): n equals a,t,g, or c
gcgtccggtggtggcggcggcgcaagggtgagggcggccccagaaccccaggtaggtagagcaagaagatggtgtttctgcccctcaaatggtcccttgcaaccatgtcatttctactttcctcactgttggctctcttaactgtgtccactccttcatggtgtcagagcactgaagcatctccaaaacgtagtgatgggacaccatttccttggaataaaatacgacttcctgagtacgtcatcccagttcattatgatctcttgatccatgcaaaccttaccacgctgaccttctggggaaccacgaaagtagaaatcacagccagtcagcccaccagcaccatcatcctgcatagtcaccacctgcagatatctagggccaccctcaggaagggagctggagagaggctatcggaagaacccctgcaggtcctggaacacccccctcaggagcaaattgcactgctggctcccgagcccctccttgtcgggctcccgtacacagttgtcattcactatgctggcaatctttcggagactttccacggattttacaaaagcacctacagaaccaaggaaggggaactgaggatactagcatcaacacaatttgaacccactgcagctagaatggcctttccctgctttgatgaacctgccttcaaagcaagtttctcaatcaaaattagaagagagccaaggcacctagccatctccaatatgccattggtgaaatctgtgactgttgctgaaggactcatagaagaccattttgatgtcactgtgaagatgagcacctatctggtggccttcatcatttcagattttgagtctgtcagcaagataaccaagagtggagtcaaggtttctgtttatgctgtgccagacaagatgaatcaagcagattatgcactggatgctgcggtgactcttctagaattttatgaggattatttcagcataccgtatcccctacccaaacaagatcttgctgctattcccgactttcagtctggtgctatggaaaactggggactgacaacatatagagaatctgctctgttgtttgatgcagaaaagtcttctgcatcaagtaagcttggcatcacaatgactgtggcccatgaactggcccaccagtggtttgggaacctggtcactatggaatggtggaatgatctttggctaaatgaaggatttgccaaatttatggagtttgtgtctgtcagtgtgacccatcctgaactgaaagttggagattatttctttggcaaatgttttgacgcaatggaggtagatgctttaaattcctcacaccctgtgtctacacctgtggaaaatcctgctcagatccgggagatgtttgatgatgtttcttatgataagggagcttgtattctgaatatgctaagggagtatcttagcgctgacgcatttaaaagtggtattgtacagtatctccagaagcatagctataaaaatacaaaaaacgaggacctgtgggatagtatggcaagtatttgccctacagatggtgtaaaagggatggatggcttttgctctagaagtcaacattcatcttcatcctcacattggcatcaggaaggggtggatgtgaaaaccatgatgaacacttggacactgcagaggggttttcccctaataaccatcacagtgagggggaggaatgtacacatgaagcaagagcactacatgaagggctctgacggcgccccggacactgggtacctgtggcatgttccattgacattcatcaccagcaaatccgacatggtccatcgatttttgctaaaaacaaaaacagatgtgctcatcctcccagaagaggtggaatggatcaaatttaatgtgggcatgaatggctattacattgtgcattacgaggatgatggatgggactctttgactggccttttaaaaggaacacacacagcagtcagcagtaatgatcgggcaagtctcattaacaatgcatttcagctcgtcagcattgggaagctgtccattgaaaaggccttggatttatccctgtacttgaaacatgaaactgaaattatgcccgtgtttcaaggtttgaatgagctgattcctatgtataagttaatggagaaaagagatatgaatgaagtggaaactcaattcaaggccttcctcatcaggctgctaagggacctcattgataagcagacatggacagacgagggctcagtctcagagcgaatgctgcggagtgaactactactcctcgcctgtgtgcacaactatcagccgtgcgtacagagggcagaaggctatttcagaaagtggaaggaatccaatggaaacttgagcctgcctgtcgacgtgaccttggcagtgtttgctgtgggggcccagagcacagaaggctgggattttctttatagtaaatatcagttttctttgtccagtactgagaaaagccaaattgaatttgccctctgcanacccnaaaataaggaaaagcttcnatggctactanatgaaagctttaagggagataaaataaaaactcaggagtttccacaaattcttacactcattggcaggaacccagtaggatacccactggcctggcaatttctgaggaaaaactggaacaaacttgtacaaaagtttgaacttggctcatcttccatagcccacatggtaatgggtacaacaaatcaattctccacaagaacacggcttgaagaggtaaaaggattcttcagctctttgaaagaaaatggttctcagctccgttgtgtccaacagacaattgaaaccattgaagaaaacatcggttggatggataagaattttgataaaatcagagtgtggctgcaaagtgaaaagcttgaacgtatgtaaaaattcctcccttgccaggttcctgttatctctaatcaccaacattttgttgagtgtattttcaaactagagatggctgttttggctccaactggagatacttttttcccttcaactcattttttgactatccctgtgaaaagaatagctgttagtttttcatgaatgggctatcgctaccatgtgttttgttcatcacaggtgttgccctgcaacgtaaacccaagtgttgggttccctgccacagaagaataaagtaccttattcttctcattttatagtttatgcttaagcacccgtgtccaaaaccctgtaccccatgtttatcattcataaactgtttcatcagtctcctcgaaagactctgaatagtcgactactgaacaatgaacacctggatctgagactaagccggacgatgactgggttaaagctctcccggctcacccctccagacccgctgcccatccctcttccttgctccatgcccaggggctgacttgtaaaggccaagtcatcaagctttcttgccctttggatgttggtcagtggggagccggagagctggagctggggtcggaggaggtagtaggtggaggtgttcttccctgattcccttgcgggatgcctcgggctggcctcccctgagggtcttagctccgagaggggaccctcttttccacacagccttctccacctctggattttggtaactgctccctcctcatcccttcaggattagtggcctcagtgggagtctggcttttactagtcctggcggacttgtggtttctacataatgtgctcgcacttttgcaaaaaatctttttatagaaccctcctcagataattctgagtgtctgtcatctatttccctgactggtacagtatctcttctgaaaaagcagagtgcattcaagtctgtaggaaaacccttttcttagggaggtgattttttttctctctctgcttcttatttggcctactttacaatttctaactaactagttattggcatttactgacagtaaattattgcagtcaccaataaatgatagtacattgtgaaacaaaatatttgctcatattagcaaataggacattctttggctttgaagtctttcttttgtgaagacttcacacacggttgcttcagcacacagttgctgctcaggttttatgtatagatgataataatagaaagcacagtttactaacatggtaaaccaacggagttcaagtcaagtcagttaataccctaagaattagattttatttcttattctgaaaacttgctacacagggacttatctaacccatagtgtgctctgttgctgacttgattcaagttgcagcgtgttttgcgctgactctaaggtgcggaaatcctcacacctggcaaaggagaattcaaactgaactttttgaatataaggcaaaaacttcaagataagggaatatgattgatgattggtacgaaaaatgtcaaaaatgtgttcccctaatacacgacaaaatagagtgacttctggacataaatctgccatttattaaaccattcactacaacaaataaataggtataaaagtggaattggaatttttatacttatttgttgtagtgaatggtttaataaaaatagaaatcactggtaatttccaccccaaactaaactatttcccttcttttaaaaaaatacacaaccaagattttaatgtaaaatattttgctttaattgtattttatgccttgattaatgaaacatggaaatattgattttcagttttggtcacctgaggaacctatctttgtttgcttttggaaaagcccattttctaaacagatacaatattgccacaacaatgtgcagaaacctttttgataataaaaaattgttctttgcctctaaaaaaaaaaaaaaaaaaaaaaaaaaaaaaaaaaaaaaaaaaaaaaaaaaaaaaaaaaaaaaaaaaaaaaaaaaaaaaaaaaaaaaaaaaaaaaaaaaaaaaaaaaaa

SEQ ID NO: 215 - DNA, 1931 bp, Homo sapiens
  misc_feature (1212)..(1212): n equals a,t,g, or c
cccgcagcagctcccaggatgaactggttgcagtggctgctgctgctgcgggggcgctgagaggacacgagctctatgcctttccggctgctcatcccgctcggcctcctgtgcgcgctgctgcctcagcaccatggtgcgccaggtcccgacggctccgcgccagatcccgcccactacagggagcgagtcaaggccatgttctaccacgcctacgacagctacctggagaatgcctttcccttcgatgagctgcgacctctcacctgtgacgggcacgacacctggggcagtttttctctgactctaattgatgcactggacaccttgctgattttggggaatgtctcagaattccaaagagtggttgaagtgctccaggacagcgtggactttgatattgatgtgaacgcctctgtgtttgaaacaaacattcgagtggtaggaggactcctgtctgctcatctgctctccaagaaggctggggtggaagtagaggctggatggccctgttccgggcctctcctgagaatggctgaggaggcggcccgaaaactcctcccagcctttcagacccccactggcatgccatatggaacagtgaacttacttcatggcgtgaacccaggagagacccctgtcacctgtacggcagggattgggaccttcattgttgaatttgccaccctgagcagcctcactggtgacccggtgttcgaagatgtggccagagtggctttgatgcgcctctgggagagccggtcagatatcgggctggtcggcaaccacattgatgtgctcactggcaaggggtggcccaggacgcaggcatcggggctggcgtggactcctactttgagtacttggtgaaaggagccatcctgcttyaggataagaagctcatggccatgttcctagagtataacaaagccatccggaactacacccgcttcgatgactggtacctgtgggttcagatgtacaaggggactgtgtccatgccagtcttccagtccttggaggcctactggcctggtcttcagagcctcattggagacattgacaatgccatgaggaccttcctcaactactacactgtatggaagcagtttggggggctcccggaattctacaacattcctcagggatacacagtggagaagcgagagggctacccacttcggccagaacttattgaaagcgcaatgtacntctaccgtgccacgggggatcccaccctcctagaactcggaagagatgctgtggaatccattgaaaaaatcagcaaggtggagtgcggatttgcaacaatcaaagatctgcgagaccacaagctggacaaccgcatggagtcgttcttcctggccgagactgtgaaatacctctacctcctgtttgacccaaccaacttcatccacaacaatgggtccaccttcgacgcggtgatcaccccctatggggagtgcatcctgggggctggggggtacatcttcaacacagaagctcaccccatcgaccctgccgccctgcactgctgccagaggctgaaggaagagcagtgggaggtggaggacttgatgagggaattctactctctcaaacggagcaggtcgaaatttcagaaaaacactgttagttcggggccatgggaacctccagcaaggccaggaacactcttctcaccagaaaaccatgaccaggcaagggagaggaagcctgccaaacagaaggtcccacttctcagctgccccagtcagcccttcacctccaagttggcattactgggacaggttttcctagactcctcataaccactggataatttttttatttttatttttttgaggctaaactataataaattgcttttggctatcaaaaaaaaaaaaaaaaaaaaaaaaaaaaaaaaaaaaaaaaaaaagggcggccgc

SEQ ID NO: 216 - DNA, 536 bp, Homo sapiens
  misc_feature (508)..(508): n equals a,t,g, or c
ggtcgacccacgcgtccgcccacgcgtccggcttccttaatgtaatttaaaccctggcaaacattctttagaaaccaagaggaaagaaagaacaaatatcaaaaaagacatagaatttaatattgatacaatttcacctctaaaatggatttgaagaaatgcaactttatatcaaaaaatgtcatctgatttcctttgtttcttttttaaattatgtaatcagatgattttatgtttttttttcaggggagcggaatattggtttcttttacttgttgttttcagttttctctgccattcatgtttcttttttgtgttcagtgtttcaaatacaatttgtatttaaggattttaaaataccaaactgtaactgagtacagtggatcgttttctgttaggatgttaatattatacaatgaaatctataaagtgttgtcaatttgattattgacacatataacatgtttacaaataaactgtggtattgatcaaaaaaaaaaaaaaaaancccggggggggccccggaacccaatccc

SEQ ID NO: 217 - DNA, 716 bp, Homo sapiens
  misc_feature (630)..(630): n equals a,t,g, or c
  misc_feature (710)..(710): n equals a,t,g, or c
gcctcagcggccgggcccacggccccgagcagccatgctgggcgcgcgggcctggttgggccgcgtccttctgctgccccgcgccggtgcaggcctcgccgcragccgcaggtgtcctggagtctggcccaggacctggccccacaggagtcccagcaggggtagctcctcccgggacaaggaccgaagtgcgacggtcagtagttcagtgcccatgcctgctggagggaaaggaagccatccttcatctacaccccagagggtccccaaccgcctgatccacgagaagtcaccatacctcctacaacatgcctacaatcctgtggactggtacccctggggacaggaagccttcgacaaggccaggaaggaaaacaagccgattttcctctcagtcgggtactccacctgccactggtgccacatgatggaagaggagtccttccagaatgaggagattggccgcctgctcagtgaggactttgtgagtgtgaaggtagaccgtgaggagcggcctgacgtggacaaggtgtacatgacgttcgtgcaggccaccagcagcggcgggggctggcccatgaatgtgtggctgactcccaacctccagccctttgtcgggggcactatttncctcctgaaggatggcttgamccgagtsggttccgcacagtgttkctgagaatacgagaacartggaaacagaacaagancaccct

SEQ ID NO: 218 - DNA, 2716 bp, Homo sapiens
ggccgggcccacggcmccgagcagccatgctgggcgcgcgggcctggttgggccgcgtccttctgctgccccgcgccggtgcaggcctcgccgcgagccgcaggtctgcctgcagtcccacttccaggctgaactccctgaggtctctgattccctaggtgtcctggagtctggcccaggacctggccccacaggagtcccagcaggggtagctcctcccgggacaaggaccgaagtgcgacggtcagtagttcagtgcccatgcctgctggagggaaaggaagccatccttcatctacaccccagaggktccccaaccgcctgatccacgagaagtcaccatacctcctacaacatgcctacaatcctgtggactggtacccctggggasaggaagccttygacaaggccaggaaggaaaacaagccgattttcctctcagtcgggtactccacctgccactggtgccacatgatggaagaggagtccttccagaatgaggagattggccgcctgctcagtgaggactttgtgagtgtgaaggtagaccgtgaggagcggcctgacgtggacaaggtgtacatgacgttcgtgcaggccaccagcagcggcgggggctggcccatgaatgtgtggctgactcccaacctccagccctttgtcgggggcacctatttccctcctgaggatggcttgacccgagtcggcttccgcacagtgttgctgagaatacgagaacagtggaaacagaacaagaacaccctgctagaaaatagccagcgtgtcaccactgccctgctggcccgatcagagatcagcgtgggtgaccgccagctgccgccctctgccgccaccgtgaacaatcgctgcttccagcagctggatgagggctatgatgaggaatacggtggcttcgctgaggcccccaagtttcccacgccggtgatcctgagcttcctgttctcctactggctcagccatcgactgactcaggatggctctcgggcccagcagatggccttgcataccctgaaaatgatggctaacgggggcatccgggaccatgtggggcagggctttcaccgctactccacagaccgccagtggcacgtccctcactttgagaagatgctctatgaccaggcacagctcgctgtggcctattcgcaggccttccagctctctggtgatgaattctactctgacgtggccaaaggcatcctgcagtacgtggctcggagcctgagccaccggtccggaggcttctatagcgcagargatgcagactcgcccccagagcggggccagcggcccaaagagggcgcctactatgtgtggacggtcaaagaggttcagcagctcctcccggagcctgtgttgggtgccaccgagccgctgacctcaggccagctcctcatgaagcactacggcctcacagaggctggtaacatcagccccagtcaggaccccaagggggagctgcagggccagaatgtgctgaccgtccggtactcgctggagctgactgctgcccgctttggcttggatgtggaggccgtgcggaccttgctcaattcagggctggagaagctcttccaggcccggaagcatcggcccaagccgcacctggacagcaagatgctggctgcctggaatggcttgatggtgtcaggctatgctgtgactggggctgtcctgggccaagacaggctgatcaactatgccaccaatggtgccaagttcctgaagcggcacatgtttgatgtggccagtggccgcctgatgcggacctgctacaccggccctggggggactgtggagcacagcaacccaccctgctggggcttcctggaggactacgccttcgtggtgcggggcctgctggacctgtatgaggcctcacaggagagtgcgtggctcgagtgggctctgcggctgcaggacacacaggacaggctcttttgggactcccagggtggcggctacttctgcagtgaggctgagctgggggctggcctgcccctgcgtctgaaggacgaccaggatggagcagagcccagcgccaattccgtgtcagcccacaacctgctccggctgcatggcttcacgggccacaaggactggatggacaagtgtgtgtgcctattgaccgccttttccgagcgcatgcgtcgtgtcccggtggcgttgcccgagatggtccgcgccctctcagcccagcagcagaccctcaagcagatcgtgatctgtggagaccgtcaggccaaggacaccaaggccctggtgcagtgcgtccactctgtctacattcctaacaaggtgctgattctggctgatggggacccctcgagcttcctgtcccgccagctgcctttcctgagtaccctccgacggttggaagaccaggccactgcatatgtgtgtgagaatcaagcctgctcagtgcccatcactgatccctgcgaattacgaaaactactacatccatgactgccccaacccccttggggtggggcagaaggtgaagcatcccaactgactagagactcaggccctgcagggccctatagaacctgtggccatccctgagcaccctgccaccaggtgacctcggccatactcactgccccccttgggcacccactcaccctagaataaacttaacagtgtcccgtggtaaaaaaaaaaaaaaaaaaaaaaaaaaaagggcggccgc

SEQ ID NO: 219 - DNA, 1257 bp, Homo sapiens
  misc_feature (549)..(549): n equals a,t,g, or c
  misc_feature (589)..(589): n equals a,t,g, or c
gttttcagcaggattttcctttcagtgaaacataatttgacttgaaaggaacccagggaaaagtgtccaggtgtgagcatgagcgggtagaggtgtgcccttgtttgcttcaggctgtctgcttttcgcccctgactgttttttctgtttctggccatggaggaagagaaagatgacagcccacaggctgacttctgcctgggcaccgccctgcactcttggggactgtggttmacggaggaaggttmaccgtccaccatgctgacggggattgcagttggagccctcctggccctggccttggttggtgtcctcatccttttcatgttcagaaggcttagacaatttcgacaagcacagcccactcctcagtaccggttccggaagagagacaaagtgatgttttacggccggaagatcatgaggaaggtgaccacactccccaacacccttgtggagaacactgccctgccccggcagcgggccaggaagaggaccaaggtgctgtctttggccaagaggattctgcgtttcaagaaggaatacccnggcctgcascccaaggacccccggccttccctgctggagnccgacttcacggagtttgacgtgaagaattctcacctgccatcggaagttctgtacatgctgaaaaacgttcgggtcctgggccactttgagaagccgctgttcctggagctttgcaaacacatcgtctttgtgcagctgcaggaaggggagcacgtcttccagcccagggagccggaccccagcatctgtgtggtgcaggacgggcggctggaggtctgcatccaggacactgacggcaccgaggtggtggtgaaagaggttctggcgggagacagcgtccacagcctgctcagcatcctggacatcatcaccggccatgctgcaccttacaaaacggtctccgtccrcgcggccatcccgtccaccatcctccggcttccagctgcggcttttcatggagtttttgagaaatatccggaaactctggtgagggtggtgcagatcatcatggtgcggctgcagagggtgacctttctggctctgcacaactacctcggcctgaccacagagctcttcaacgctgagagccaggccatccctctcgtgtctgtagccagtgtggctgccgggaaggccaagaagcaggtgttctatggcgaagaagagcggcttaaaaagccaccgcggctccaggagtcctgtgactcagatcacgggggcggccgc

SEQ ID NO: 220 - DNA, 2342 bp, Homo sapiens
  misc_feature (66)..(66): n equals a,t,g, or c
  misc_feature (2332)..(2332): n equals a,t,g, or c
tccgggggctgctcctgcatcatccaacccttccaaacccctacacgatggctgtggctgcacgantcacggcagctaccacggtaacccacatcacagcctttgaccctgacagcacggggcagcaggtgtggcaggatctacttcaggatggacagctggactctcccactggtgatggggggtctgactgggagatggtgggaagagaggttgtccctgtcttgggaccaggggtgggaggcctggtaataagtaggccttgtttccatgttagggatccctatccctggggctgaaggggctcctgtcctgaattctcttgtgtttctctcaggccaaagcacccctacgcagaaaggagtaggcattgctggagctgtgtgtgtttccagcaagttgcgacctcgaggccagtgccgcctggagttttcactggcttgggacatgcccaggatcatgtttggagctaaaggccaagtccactacaggcggtatacaaggttctttggccaggatggagatgcagcacctgccctcagccactatgcactgtgccgatacgcagagtgggaagagaggatctcagcttggcagagcccggtattggatgacagatcactgcctgcctggtacaaatctgcgctgttcaatgaactatacttcctggctgatggaggcacagtgtggctggaagttcttgaggactccctaccagaggagctgggcagaaacatgtgtcacctccgccccaccctacgggactacggtcgatttggctaccttgagggccaggagtaccgcatgtacaacacatatgatgtccacttttatgcttcctttgccctcatcatgctctggcccaaacttgagctcagcctacagtatgacatggctctggccactctcagggaggacctgacacggcgacggtacctgatgagtggggtgatggcacctgtgaaaaggaggaacgtcatcccccatgatattggggacccagatgatgaaccatggctccgcgtcaatgcatatttaatccatgatactgctgattggaaggacctgaacctgaagtttgtgctgcaggtttatcgggactattacctcacgggtgatcaaaacttcctgaaggacatgtggcctgtgtgtctagctgtgatggaatctgaaatgaagtttgacaaggaccatgatggactcattgaaaatggaggctatgcagaccagacctatgatggatgggtgaccacaggccccagtgcttactgtggagggctgtggctggcagctgtggctgtgatggtccagatggctgctctgtgtggggcacaggacatccaggataagttttcttctatcctcagccggggccaagaagcctatgagagactgctgtggaatggccgctattacaactatgacagcagctctcggcctcagtctcgtagtgttatgtctgaccagtgtgctggacagtggttcctgaaggcctgtggctaggagaaggagacactgaggtgtttcctacccaacatgtggtccgtgctctccaaactatctttgagctgaacgtccaggcctttgcaggaggggccatgggggctgtgaatgggatgcagccccatggtgtccctgataaatccagtgtgcagtctgatgaagtctgggtgggtgtggtctacgggctggcagctaccatgatccaagagggcctgacttgggagggcttccagacagctgaaggctgctaccgtaccgtgtgggagcgcctgggtctggccttccagaccccagaggcatactgccagcagcgagtgttccgctcactggcctacatgcggccactgagcatatgggccatgcagctagccctgcaacagcagcagcacaaaaaggcctcctggccaaaagtcaaacagggcacaggactaaggacagggcctatgtttggaccaaaggaagccatggcaaacctgagcccagagtgagccgtctgaactgtgggagggaagtgctaacagcccagcctccagcctggcctttcctccttcccctctgaacctcctgcaaccctgagccatcaggacaatcataccccttcccttctctccacccaattgtgccagtaaatgggggttgagggtgacctaggcagcattagaatcacttatttatttctttcctcacctgttccctgactgcgtgaaatgttcagggaggtcagttgatttccccaggtacattcatggtgtgacagacacatgggtacaaataaaagacccagaaagccaaaaaaaaaaaaaaaaaaaaactcgagggggggcccggnacccaattcg

SEQ ID NO: 221 - DNA, 1052 bp, Homo sapiens
tcgacccacgcgtccgcccacgcgtccgcccacgcgtccgggcgggcgcaggacgtgcactatggctcggggctcgctgcgccggttgctgcggctcctcgtgctggggctctggctggcgttgctgcgctccgtggccggggagcaagcgccaggcaccgccccctgctcccgcggcagctcctggagcgcggacctggacaagtgcatggactgcagcacctcctgcccccttccggctgctttggcccatccttgggggcgctctgagcctgaccttcgtgctggggctgctttctggctttttggtctggagacgatgccgcagagagagaagttcaccacccccatagaggagaccggcggagagggctgcccagctgtggcgctgatccagtgacaatgtgccccctgccagccggggctcgcccactcatcattcattcatccattctagagccagtctctgcctcccagacgcggcgggagccaagctcctccaaccacaaggggggtggggggcggtgaatcacctctgaggcctgggcccagggttcaggggaaccttccaaggtgtctggttgccctgcctctggctccagaacagaaagggagcctcacgctggctcacacaaaacagctgacactgactaaggaactgcagcatttgcacaggggagggggtgccctccttcctagaggccctgggggccaggctgacttggggggcagacttgacactaggccccactcactcagatgtcctgaaattccaccacgggggtcaccctggggggttagggacctatttttaacactagggggctggcccactaggagggctggccctaagatacagacccccccaactccccaaagcggggaggagatatttattttggggagagtttggaggggagggtggggggggggaaaaaaaaataaaaaaaaaaatttttaatttttaaaaaaaaaaaaaaaaaaaaaaaaaaaaaaaaaaaaaaaaaaaaaaaaaaaaaaaaaaaaaaaaaaaaaaaaaaaaaaaaaaaaaa

SEQ ID NO: 222 - DNA, 1037 bp, Homo sapiens
  misc_feature (936)..(936): n equals a,t,g, or c
  misc_feature (946)..(946): n equals a,t,g, or c
  misc_feature (951)..(951): n equals a,t,g, or c
ccggtccggaattcccgggtcgacccacgcgtccgggcgggcgcaggacgtgcactatggctcggggctcgctgcgccggttgctgcggctcctcgtgctggggctctggctggcgttgctgcgctccgtggccggggagcaagcgccaggcaccgccccctgctcccgcggcagctcctggagcgcggacctggacaagtgcatggactgcagcacctcctgcccccttccggctgctttggcccatccttgggggcgctctgagcctgaccttcgtgctggggctgctttctggctttttggtctggagacgatgccgcaggagagagaagttcaccacccccatagaggagaccggcggagagggctgcccagctgtggcgctgatccagtgacaatgtgccccctgccagccggggctcgcccactcatcattcattcatccattctagagccagtctctgcctcccagacgcggcgggagccaagctcctccaaccacaaggggggtggggggcggtgaatcacctctgaggcctgggcccagggttcaggggaaccttccaaggtgtctggttgccctgcctctggctccagaacagaaagggagcctcacgctggctcacacaaaacagctgacactgactaaggaactgcagcatttgcacaggggaagggggtgccctccttcctagaggccctgggggccaggctgacttggggggcagacttgacactaggccccactcactcagatgtcctgaaattccaccacgggggtcaccctggggggttagggacctatttttaacactagggggctggcccactaggagggctggccctaagatacagacccccccaactccccaaagcgggggggggatatttattttggggagagtttggaggggagggggattttttttttaaangattttttanttttnaaaaaaaaaaaaaaaaaaaaaaaaaaaaaaaaaaaaaaaaaaaaaaaaaaaaaaaaaaaaaaaaaaaaaaaaaaaaaaaaaaaaaa

SEQ ID NO: 223 - DNA, 1501 bp, Homo sapiens
tggcaacaaaagctggagctccaccgcggtggcggccgctctagaactagtggatcccccgggctgcaggaattcggcacgagcaaagccgaggagaaggccttgaagagagtccggaggaaaatcaagaacaagatctcagcccaggagagccgtcgtaagaagaaggagtatgtggagtgtctagaaaagaaggtggagacatttacatctgagaacaatgaactgtggaagaaggtggagaccctggagaatgccaacaggaccctgctccagcagctgcagaaactccagactctggtcaccaacaagatctccagaccttacaagatggccgccacccagactgggacctgcctcatggtggcagccttgtgctttgttctggtgctgggctccctcgtgccctgccttcccgagttctcctccggctcccagactgtgaaggaagaccccctggccgcagacggcgtctacacggccagccagatgccctcccgaagcctcctattctacgatgacggggcaggcttatgggaagatggccgcagcaccctgctgcccatggagcccccagatggctgggaaatcaaccccggggggccggcagagcagcggcccsgggaccacctgcagcatgatcacctggacagcacccacgagaccaccaagtacctgagtgaggcctggcctaaagacggtggaaacggcaccagccccgacttctcccactccaaggagtggttccacgacagggatctgggccccaacaccaccatcaaactctcctaggccatgccaagacccaggacataggacggacccctggtacccagaagaggagttcttgctcactaacccggatccgcctcgtgcccctgcctcctggagcttcccattccaggagaaaaggctccacttcccagcccttccttgcccctgacatttggactcttcccttgggccgaccactctgttctcattctccttcccaccaacatccatccgtccttctcagacaaaccactcactgggtaccccacctcctctctcatatgcccaacacgaccactgcctccctgcccccacacctgcacccaaacagacacatcaacgcaccccactcacagacaccccttaccccacccccactgtacagagaccaagaacagaaattgtttgtaaataatgaaccttattttttattattgccaatcccctaagatattgtattttacaaatctccctcttcccttcgcccctcccttgttttatattttatgaagttagtgcgggctttgctgctccctggcccaggaaagagggactacctgaccctcacctggcacccccctgctgctgcccaagccgctgggcctttttaattgccaaactgctctcttcatcagctcagcacatgctttaagaaagcaaaaccaaaaaaaaaaaaaaaaagatgcagcatcaaaaaaaaaaaaaaaaaaaaaaaaaaaaaaaaaaa

SEQ ID NO: 224 - DNA, 1441 bp, Homo sapiens
acagaaggggagacgtggcgcagcgactcggaggttcgcctccagcttgcgcatcatctgcggccgggtcccgatgagcctcctgttgcctccgctggcgctgctgctgcttctcgcggcgcttgtggccccagccacagccgccactgcctaccggccggactggaaccgtctgagcggcctaacccgcgcccgggtagagacctgcgggggatgacagctgaaccgcctaaaggaggtgagctttgaaggaagaggtccctagctctgttccccctgagcctcttggggagtgggcaacatggtcccaatgactggggcggggaggggggaaggatccctaggctgagagtctagcctaggctgggagtctagcctgcacctgacttgctttatgacctcactgggcttcagtgtctcgtctgtacctcgagtagactgaggtcatggtctctgatgctctggttcctccccaggtgaaggctttcgtcacgcaggacattccattctagtatccttctgttctgggggaggggaaatgggatgggcacctgggagaatctccacgtaacttcagaaaggggtggcagatggttttcaactgacaagttgaattgattggtagtggctcccagaggattctgaggtggtctccatgttgggtgggcaagagagattgactagtgatgactgccacagaatggagaggagggccctttacttctttgaaccctaattttctcacgtataagcggagaccctggcccctcccgggcacagagtaagctctgagcaaaggaggcaatgctgttcccatcagtaaggctgcggaaaccaccacctccctctgcccaccaccccgctccttaacaccacctccagtcacaacctggtgatgaaacacctccctggggccgaccctgagctcgtgctgctgggccgccgctacgaggaactagaggtgaggccgtgggaggtgggctgggggcgaggccagaggcgaggcccagcctgctgaccccgcccctcctccgcctcagcgcatcccactcagtgaaatgacccgcgaagagatcaatgcgctagtgcaggagctcggcttctaccgcaaggcggcgcccgacgcgcaggtgccccccgagtacgtgtgggcgcccgcgaagcccccagaggaaacttcggaccacgctgacctgtaggtccgggggcgcggcggagctgggacctacctgcctgagtcctggagacagaatgaagcgctcagcatcccgggaatacttctcttgctgagagccgatgcccgtccccgggccagcagggatggggttggggaggttctcccaaccccactttcttccttccccagctccactaaattccctcctgccttaaaaaaaaaaaaaaaaaaaaaaaaaaaaaaaaaaaaaaaaagggcggccgc

SEQ ID NO: 225 - DNA, 539 bp, Homo sapiens
gacctcctacatttatgagcaaagctcggtttccctttttgctttccctccgctggttctctgcttagaacactcacaggcatccttgggaaccagactccctgtggtcacaccatcctcactcccctcctcctgcaaggaataggatgtggtttcctggagcttggatagaaagaacaggaagggcgttttcatatgcccggcattaaggctttgaagttcttaaaaccccttctagggtgaaaccgttagggaatttcaacgacgtactagaattattgaacaaatgcaatgggaggatcttgccttgatcctgaagcaacaaatacactttaaaatgacgttttagagggaaatgggggaaattgaatatggactgggaactaaatgattgaaagtagttttgttaatcttgttggtataatattttgtagttctgtttttaaactgctgtcagtgtttatggccagagtctaaatgtttacgagttgctttgcttttaaaatattccaacaaaaaaaaaaaaaaagggcggcgct

SEQ ID NO: 226 - DNA, 1069 bp, Homo sapiens
  misc_feature (508)..(508): n equals a,t,g, or c
ggcacgagcacagcctcaggccctgccccagacctgcagaatcagaaactctggggtgaggcctggttatctgctgtaacagaccttccagtgggttctgatgccctctagagcaggagaaccactagcttagaggttgcagtatgtttggcatcttgccatttgtgttagttcagaggaatggctgacccccatgtctcatttctaagcttcaggcagcttttctcctgggcagctgtcattctgttgaggggaatcctggggactgtggctcctcctccctgtccgtgtgtccttgatctggcagtctacccccttcatctccccgtggaggctccatgcctagaggtggtcttcaaacagaagaatggcaaagataattgtctcgtgttttaccctgaccccattcctttaagagggtcacttcttggcccattcattaaaaaccaatgtcatagttctgtgattccactatcagacagtgccacgtccaaggcgcgggctcttnacctccctggaagagagactgtgctgtctgtgcttcctgtgttctccagtcccacgctcccacggacccacgcccttggagactccctcggtgtcccagggcttctggtgtgttcagagacctccacactcaacgaccactggtgctgcagaagggccggtgcttacattccaattaacagacgcttttcccatctaatgcctcttgccttctcctaacaccacctcgggagtgtttatgtctattctaagtgaatttcactgtgtgaaaaaattcacacctgttgtcccagcgatttgggaggccggggcgggtgtatcatttgagcccaggagtttgaggctagcctgggcaggatggtgaaaccccgtctctataaagaaattttaaaaattagctgggcatagtggcacgtgcctgtagttccatctactggggaggctggggtgggaggatcgcatgagcccgggagtttgaggctgcagtgagctgtgatcgcagcactgcactccagtctgggcaacagagcaagaccctgtctcttaaaaaaaaaaaaaaaaa

SEQ ID NO: 227 - DNA, 1154 bp, Homo sapiens
aagacaggaaaagctccaggccgtggttctcaaagtgtggtccctggacagcagcaacatcacctaggagcctgttagggaaggcacagcctcaggccctgccccagacctgcagaatcagaaactctggggtgaggcctggttatctgctgtaacagaccttccagtgggttctgatgccctctagagcaggagaaccactagcttagaggttgcagtatgtttggcatcttgccatttgtgttagttcagaggaatggctgacccccatgtctcatttctaagcttcaggcagcttttctcctgggcagctgtcattctgttgaggggaatcctggggactgtggctcctcctccctgtccgtgtgtccttgatctggcagtctacccccttcatctccccgtggaggctccatgcctagaggtggtcttcaaacagaagaatggcaaagataattgtctcgtgttttaccctgaccccattcctttaagagggtcacttcttggcccattcatttaaaaaccaatgtcatagttctgtgattccacctatcagacagtgccacgtccaaaggcggggctctyacctccctggraagagagactgttgctgtctgtgcttcctgtgttctccagtcccacgctcccacggacccacgcccttggagactccctcrgtgtcccagggcttctggtgtgttcagagacctccacactcaacgaccactggtgctgcagaagggccggtgcttacattccaattaacagacgcttttcccatctaatgcctcttgccttctcctaacaccacctcgggagtgtttatgtctattctaagtgaatttcactgtgtgaaaaaattcacacctgttgtcccagcgatttgggaggccggggcgggtgtatcatttgagcccaggagtttgaggctagcctgggcaggatggtgaaaccccgtctctataaagaaattttaaaaattagctgggcatagtggcacgtgcctgtagttccatctactggggaggctggggtgggaggatcgcatgagcccgggagtttgaggctgcagtgagctgtgatcgcagcactgcactccagtctgggcaacagagcaagaccctgtctcttaaaaaaaaaaaaaaaaactcgag

SEQ ID NO: 228 - DNA, 1197 bp, Homo sapiens
  misc_feature (573)..(573): n equals a,t,g, or c
  misc_feature (1177)..(1177): n equals a,t,g, or c
  misc_feature (1185)..(1185): n equals a,t,g, or c
aagacaggaaaagctccaggccgtggttctcaaagtgtggtccctggacagcagcaacatcacctaggagcctgttagggaaggcacagcctcaggccctgccccagacctgcagaatcagaaactctggggtgaggcctggttatctgctgtaacagaccttccagtgggttctgatgccctctagagcaggagaaccactagcttagaggttgcagtatgtttggcatcttgccatttgtgttagttcagaggaatggctgacccccatgtctcatttctaagcttcaggcagcttttctcctgggcagctgtcattctgttgaggggaatcctggggactgtggctcctcctccctgtccgtgtgtccttgatctggcagtctacccccttcatctccccgtggaggctccatgccwagaggtggtcttcaaacagaagaatggcaaarataattgtctcgtgttttaccctgaccccattcctttaagagggtcacttcttggcccattcatttaaaaaccaatgtcatagttctgtgattccacctatcagacagtgccacgtccaangcggggctctcacctccctgggaagagagactgttgctgtctgtgcttcctgtgttctccagtcccacgctcccacggacccacgcccttggagactccctcagtgtcccagggcttctggtgtgttcagagacctccacactcaacgaccactggtgctgcagaagggccggtgcttacattccaattaacagacgcttttcccatctaatgcctcttgccttctcctaacaccacctcgggagtgtttatgtctattctaagtgaatttcactgtgtgaaaaaattcacacctgttatcccagcaatttgggaggccgaggcgggtgtatcatttgggcccaggagtttgagactagcctgggcaagatggtgaaaccccgtctctataaagaaattttaaaaattggctgggcatagtggcgcgtgcctgtagttccatctgctggggaggctggggtgggaggatcgcatgagcccgggagtttgaggctgcagtgagctgtgatcgcggcactgcactccagtctgggcaacagagcaaaaccctgtctcttaaaaaaaaaaaaaactcgagggggggcccggtacccaattcgccctnatsagtgnagtcgtattaca

SEQ ID NO: 229 - DNA, 1347 bp, Homo sapiens
ggcacgagctggtctatagtgaagttactggccattccaaaggctatggatttgtggaatacatgaaaaaggactttgctgcaaaggctagactggagctattgggtagacagttgggagcatcagcactctttgcacaatggatggatgttaatctattggcttcagagctcattcattctaagtgcctttgtattgataaactccccagtgactacagggattcagaagagctgttgcaaattttttccagtgtccataaacctgtgttttgccagcttgcacaggatgaaggtagttacgttggtggctttgcagtggttgaatatagcactgcggagcagctgaagaggtccagcagcagcagacggtatgaccatcaaggcagcaaagtccaggtttccttctgtgctcctggagcgccagggcgaagtacattagcagcattgatagcggctcaacgtgtgatgcacagtaatcaaaagggcttacttccagagccaaatccagtacaaattatgaaaagtttaaacaaccctgccatgttgcaagttcttctacagccccagttatgtggacgagctgttaaaccaggtatggaccatgtatgtatactgattaattaaagaatgctagcatgaagttaattttttcacatgtgaaatatggaaaaatacattgatttgtgaaaaatatatttaaattagtataaaatatttaatttttctaggacctgttaatgaattttaacaataatctgaggtgatatattttgactatttttgacatatacaacctgcttatgtggtattttttactattaataaagctaaatatcaaaccttctgtttagctcttagttgacatgaatttatagaccaaggtaaaggttaacacactacattgttataacctatattaacaaagaattaatactctctatgtaatatttttagcagaattattttgttgaaaagtgccaagtgtttgtttcctctttgttcttcccctttttgttgtaaaattgtttcactttgtagcaaatgatgaaaacattattattttctaagtgttatgcaaatctttataatatcagtatacattaaatatctacctatttagtattctttctctagtaagagcttaccttctgtgcattctgaaatgtacaactttttatgtacaaaaatgtctgttttagcattatgaggaaatgaatgcctatacagtggtctccccttatctatgttcttgtgttccacagtttagttacctgcagtctgaaaatattaagtggaaaattccaaaaataaactacttataggttttaaaaaaaaaaaaaaaaaa

SEQ ID NO: 230 - DNA, 1821 bp, Homo sapiens
ggaattcggcacgagcgtggatccaagatggcgacggcgatggattggttgccgtggtctttactgcttttctccctgatgtgtgaaacaagcgccttctatgtgcctggggtcgcgcctatcaacttccaccagaacgatcccgtagaaatcaaggctgtgaagctcaccagctctcgaacccagctaccttatgaatactattcactgcccttctgccagcccagcaagataacctacaaggcagagaatctgggagaggtgctgagaggggaccggattgtcaacacccctttccaggttctcatgaacagcgagaagaagtgtgaagttctgtgcagccagtccaacaagccagtgaccctgacagtggagcagagccgactcgtggccgagcggatcacagaagactactacgtccacctcattgctgacaacctgcctgtggccacccggctggagctctactccaaccgagacagcgatgacaagaagaaggaaagtgatatcaaatgggcctctcgctgggacacttactgaccatgagtgacgtccagatccactggttttctatcattaactccgttgttgtggtcttcttcctgtcaggtatcctgagcatgattatcattcggaccctccggaaggacattgccaactacaacaaggaggatgacattgaagacaccatggaggagtctgggtggaagttggtgcacggcgacgtcttcaggccccccccagtaccccatgatcctcagctccctgctgggctcaggcattcagctgttctgtatgatcctcatcgtcatctttgtagccatgcttgggatgctgtcgccctccagccggggagctctcatgaccacagcctgcttcctcttcatgttcatgggggtgtttggcggattttctgctggccgtctgtaccgcactttaaaaggccatcggtggaagaaaggagccttctgtacggcaactctgtaccctggtgtggtttttggcatctgcttcgtattgaattgcttcatttggggaaagcactcatcaggagcggtgccctttcccaccatggtggctctgctgtgcatgtggttcgggatctccctgcccctcgtctacttgggctactacttcggcttccgaaagcagccatatgacaaccctgtgcgcaccaaccagattccccggcagatccccgagcagcggtggtacatgaaccgatttgtgggcatcctcatggctgggatcttgccttcggcgccatgttcatcgagctcttcttcatcttcagtgctatctgggagaatcagttctattacctctttggcttcctgttccttgttttcatcatcctggtggtatcctgttcacaaatcagcatcgtcatggtgtacttccagctgtgtgcagaggattaccgctggtggtggagaaatttcctagtctccgggggctctgcattctacgtcctggtttatgccatcttttatttcgttaacaagtgactgcagcgccaagcggcatccaccaagcatcaagttggagaaaagggaacccaagcagtagagagcgatattggagtcttttgttcattcaaatcttggatttttttttttccctaagagattctctttttagggggaatgggaaacggacacctcataaagggttcaaagatcatcaatttttctgactttttaaatcattatcattattatttttaattaaaaaaatgcctgtatgcctttttttggtcggattgtaaataaatataccattgtcctacaaaaaaaaaaaaaaaaaactcgagggggggcc

SEQ ID NO: 231 - DNA, 1094 bp, Homo sapiens
ccacgcgtccggtgcacggcgacgtcttcaggcccccccagtaccccatgatcctcagctccctgctgggctcaggcattcagctgttctgtatgatcctcatcgtcatctttgtagccatgcttgggatgctgtcgccctccagccggggagctctcatgaccacagcctgcttcctcttcatgttcatgggggtgtttggcggattttctgctggccgtctgtaccgcactttaaaaggccatcggtggaagaaaggagccttctgtacggcaactctgtaccctggtgtggtttttggcatctgcttcgtattgaattgcttcatttggggaaagcactcatcaggagcggtgccctttcccaccatggtggctctgctgtgcatgtggttcgggatctccctgcccctcgtctacttgggctactacttcggcttccgaaagcagccatatgacaaccctgtgcgcaccaaccagattccccggcagatccccgagcagcggtggtacatgaaccgatttgtgggcatcctcatggctgggatcttgcccttcggcgccatgttcatcgagctcttcttcatcttcagtgctatctgggagaatcagttctattacctctttggcttcctgttccttgttttcatcatcctggtggtatcctgttcacaaatcagcatcgtcatggtgtacttccagctgtgtgcagaggattaccgctggtggtggagaaatttcctagtctccgggggctctgcattctacgtcctggtttatgccatcttttatttcgttaacaagctggacatcgtggagttcatcccctctctcctctactttggctacacggccctcatggtcttgtccttctggctgctaacgggtaccatcggcttctatgcagcctacatgtttgttcgcaagatctatgctgctgtgaagatagactgattggagtggaccacggccaagcctgctccgtcctcggacaggaagccaccctgcgtgggggactgcaggcacgcaaaataaaataactcctgctcgtttggaatgtaaaaaaaaaaaaaaaaaaaaaaaaaaaaaaaaaaa

SEQ ID NO: 232 - DNA, 549 bp, Homo sapiens
  misc_feature (496)..(496): n equals a,t,g, or c
gggacgcgtcgttgcagcagcggctcccagctcccagccaggattccgcgcgccccttcacgcgccctgctcctgaacttcagctcctgcacagtcctccccaccgcaaggctcaaggcgccgccggcgtggaccgcgcacggcctctaggtctcctcgccaggacagcaacctctcccctggccctcatgggcaccgtcagctccaggcggtcctggtggccgctgccactgctgctgctgctgctgctgctcctgggtcccgcgggcgcccgtgcgcaggaggacgaggacggcgactacgaggagctggtgctagccttgcgttccgaggaggacggcctggccgaagcacccgagcacggaaccacagccaccttccaccgctgcgccaaggatccgtggaggttgcctggcacctacgtggtggtgctgaaggaggagacccacctctcgcagtcagagcgcactgcccgccgcctgcaggcccaggctgnccgccggggatacctaccaagatcctgcatgtcttccatggccttcttcctgg

SEQ ID NO: 233 - DNA, 1120 bp, Homo sapiens
  misc_feature (6)..(6): n equals a,t,g, or c
  misc_feature (13)..(13): n equals a,t,g, or c
  misc_feature (17)..(17): n equals a,t,g, or c
  misc_feature (1020)..(1020): n equals a,t,g, or c
  misc_feature (1084)..(1084): n equals a,t,g, or c
cttaancgggggnccanggggaaaactcgtgacmytatagaaggtacgcctgcaggtaccggtccggaattcccgggtcgacccacgcgtccggagccaggcagtgagactggctcgggcgggccgggacgcgtcgttgcagcagcggctcccagctcccagccaggattccgcgcgccccttcacgcgccctgctcctgaacttcagctcctgcacagtcctccccaccgcaaggctcaaggcgccgccggcgtggaccgcgcacggcctctaggtctcctcgccaggacagcaacctctcccctggccctcatgggcaccgtcagctccaggcggtcctggtggccgctgccactgctgctgctgctgctgctgctcctgggtcccgcgggcgcccgtgcgcaggaggacgaggacggcgactacgaggagctggtgctagccttgcgttccgaggaggacggcctggccgaagcacccgagcacggaaccacagccaccttccaccgctgcgccaaggatccgtggaggttgcctggcacctacgtggtggtgctgaaggaggagacccacctctcgcagtcagagcgcactgcccgccgcctgcaggcccaggctgcccgccggggatacctcaccaagatcctgcatgtcttccatggccttcttcctggcttcctggtgaagatgagtggcgacctgctggagctggccttgaagttgccccatgtcgactacatcgaggaggactcctctgtctttgcccagagcatcccgtggaacctggagcggattacccctccacggtaccgggcggatgaataccagccccccgacggaggcagcctggtggaggtgtatctcctagacaccagcatacagagtgaccaccgggaaatcgagggcagggtcatggtcaccgacttcgagaatgtgcccgaggaggacgggacccgcttccacagacaggccagcaagtgtgacagtcatggacccacctggcaggggtggtcagcggncgggatgccggcgtggccaagggtgccagcatgcgcagcctgcgcgtgctttcccaaaaaaaanccccttttggggggccccccccaaaaaaaggggggg

SEQ ID NO: 234 - DNA, 1893 bp, Homo sapiens
  misc_feature (1)..(1): n equals a,t,g, or c
  misc_feature (5)..(5): n equals a,t,g, or c
  misc_feature (1853)..(1853): n equals a,t,g, or c
  misc_feature (1871)..(1871): n equals a,t,g, or c
ngggntttttttttttttttttttttttaggacaacgtttgtttgtttttattttaaaaagtcaccatattaataaaaatgctacaaaacccagaataaatatcttcaagttacaaaagcaaaacaggtctagaaaagttggctgtaaaaaggcaacagagaggacagacccaaaagataaatgtctgcttgcttgggtggggctggtgctcaaggagggacagttgttggccctctcccccgaccatgccttagaagcatctccgccaggccagtgaatcaggcctgggtgataacggaaaaagttccatgcctgcaggcatcgttctgccatcactcaccgagcttcctggtctgtgttccccttcccagcctcactgttacccgtaaaaatgaggagcccagccgggtgaagtaagaagaggcttggcttcagagccagcccaatctgcgtttctggctcagttcctgctgtgtgagcttggcaggcacgccccctctggttccaggtttcttcctctgtgaagtaggggtgcgaakwgtgtactgccgggtagtggagcgggttggctgagacagtgcatgcaccactgcacactgccgagtcagtcctaggtgatggctccccgcaggccacctttgggtgttgctagcacagcctggcatagagcagagtaaaggtggctcaggaaaccaagcacagcctgtgaccaccaggggcrcacctgtctccagctctggctagatgccatccagaaagctaagcctccattaatcagggagcccccaggggcttctccacagttagctggagatgagggccatcagcacctttcacactmaccccccaacgatgtttgtccctgcagcccctaccgccccctcccctatccatgggaagaatcctgcctccttggtggagacctgaggattgaatgcctggcacggaacaagagctcaataaaagtcattctgcccacggacatcggcacattgggagcagctggcagcacccgagcacagctcgacctgtttgaatggtgaaatgccccacagtgagggagggagcttcctggcacctccacctggggaggaggcacccagagtgagtgagttccaggcaaggaggctgccccactcaagggccaggccagcagccccggaaaggcggaagcatccccatcccctcgtgccaggccatggagggctgagagagggacaagtcggaaccattttaaagctcagccccagcccttgaccctccccagacacccatcctgggatggggctgtcactggagctcctgggaggcctgcgccaggtgccggctccggcagcagatggcaacggctgtcacggcctcttcgctggtgctgcctgtagtgctgacgtcccggctcctgactacacacgtgttgtctacggcgtaggcccccaggacgtgggaggtcccagggagggcactgcagccagtcagggtccagccctcctcgcaggccacggtcacctgctcctgaggggccgggattccatgctccttgactttgcattccagacctggggcatggcagcaggaagcgtggatgctggcctccctgtggcccacgcactggttgggctgacctcgtggcctcagcacaggcggcttgtgggtrccaarrtcctccacctcccagtgggagctgcagcctgtgaggacgtggccctgttggtggcagtggacacgggtccccatgctggcctcagctggtggagctgtgtggacgctgcagttggcctggggtagcagacagcacctggcaatggcgtagacaccctcacccccaaaagcgttgtgggcccgggagcccaanttsaaagaagattccccnttcccccccstcccccgtgtgc

SEQ ID NO: 235 - DNA, 1187 bp, Homo sapiens
  misc_feature (39)..(39): n equals a,t,g, or c
  misc_feature (46)..(46): n equals a,t,g, or c
  misc_feature (1052)..(1052): n equals a,t,g, or c
  misc_feature (1108)..(1108): n equals a,t,g, or c
  misc_feature (1129)..(1129): n equals a,t,g, or c
  misc_feature (1138)..(1138): n equals a,t,g, or c
  misc_feature (1158)..(1158): n equals a,t,g, or c
  misc_feature (1172)..(1172): n equals a,t,g, or c
gcacccacctggcaggggtggtcagcggccgggatgttnggcgtgntcaagggtgccagcatgcgcagcctgcgcgtgctcaactgccaagggaagggcacggttagcggcaccctcataggcctggagtttattcggaaaagccagctggtccagcctgtggggccactggtggtgctgctgcccctggcgggtgggtacagccgcgtcctcaacgccgcctgccagcgcctggcgagggctggggtcgtgctggtcaccgctgccggcaacttccgggacgatgcctgcctctactccccagcctcagctcccgaggtcatcacagttggggccaccaatgcccaggaccagccggtgaccctggggactttggggaccaactttggccgctgtgtggacctctttgccccaggggaggacatcattggtgcctccagcgactgcagcacctgctttgtgtcacagagtgggacatcacaggctgctgcccacgtggctggcattgcagccatgatgctgtctgccgagccggagctcaccctggccgagttgaggcagagactgatccacttctctgccaaagatgtcatcaatgaggcctggttccctgaggaccagcgggtactgacccccaacctggtggccgccctgccccccagcacccatggggcaggttggcagctgttttgcaggactgtgtggtcagcacactcggggcctacacggatggccacagccatcgcccgctgcgccccagatgaggagctgctgagctgctccagtttctccaggagtgggaagcggcggggcgagcgcatggaggcccaagggggcaagctggtctgccgggcccacaacgcttttgggggtgagggtgtctacgccattgccaggtgctgcctgctaccccaggccaactgcagcgtycacacagcttcaccagctgaggccagcatggggacccgtgtccactgcaccaacagggccacgtcctcacaggctgcagcttccactgggaggtggaagaaccttggcacccacaagcccgncttgtgctgaagccaccaaggtcaagcccaaccaagtgccgtgggccacaaggganggccaagcattccacgctttncttgcttgncattgcccccaagtcttggnaatggcaaaagtcnaaggaagcattggga

SEQ ID NO: 236 - DNA, 1286 bp, Homo sapiens
  misc_feature (1149)..(1149): n equals a,t,g, or c
gactgctttacggacattggatgaagccgaagcatttagaatggtgcctggcacacagttggtgcgtgatatggttaagctttgtgtccccacccacatctcatcttgaatgtgacggtttccccggctccctcctgccgccatgtgaagaaggtcgttgcttccccttcaccttccaccaccatgattgccatggatgctccccactccaaagcagccctggacagcattaacgagctgcccgagaacatcctgctggagctgttcacgcacgtgcccgcccgccagctgctgctgaactgccgcctggtctgcagcctctggcggggacctcatcgacctcatgaccctctggaaacgcaatgcctgcgagagggcttcatcaccaaggactgggaccagcccgtggccgactggaaaatcttctatttcctacggagcctgcataggaactcctgcgcaacccgtgtgctgaagaggatatgtttgcatggcaaattgatttcaatggtggggaccgctggaaggtggagagcctccctggagcccacgggacagattttcctgaccccaaagtcaagaagtattttgtcacatcctacgaaatgtgcctcaagtcccagctggtggaccttgtagccgagggctactgggaggagctactagacacattccggccggacatcgtggttaaggactggtttgctgccagagccgactgtggctgcacctaccaactcaaagtgcagctggcctcggctgactacttcgtgttggcctccttcgagcccccacctgtgaccatccaacagtggaacaatgccacatggacagaggtctcctacaccttctcagactacccccggggtgtccgctacatcctcttccagcatgggggcagggacacccagtactgggcaggctggtatgggccccgagtcaccaacagcagcattgtcgtcagccccaagatgaccaggaaccaggcctcctccgaggctcagcctgggcagaagcatggacaggaggaggctgcccaatcgccctaccgagctgttgtccagattttctgacagctgtccatcctgtgtctgggtcagccagaggttcctccaggcaggagctgagcatggggtgggcaagtgaggnccctgtaccaagcgacttctgccccggttcaaccctaccaagcttgggggaacttactgcacatagctctgacgttttgttgtaataaatgttttcaggccgggcaaaaaaaaaaaaaaaaaaaaaaaaaaaaaaaa

SEQ ID NO: 237 - DNA, 1356 bp, Homo sapiens
  misc_feature (1231)..(1231): n equals a,t,g, or c
cccacgcgtccgaaagaatgttgtggctgctcttttttctggtgactgccattcatgctgaactctgtcaaccaggtgcagaaaatgcttttaaagtgagacttagtatcagaacagctctgggagataaagcatatgcctgggataccaatgaagaatacctcttcaaagcgatggtagctttctccatgagaaaagttcccaacagagaagcaacagaaatttcccatgtcctactttgcaatgtaacccagaggtatcattctggtttgtggttacagacccttcaaaaaatcacacccttcctgctgttgaggtgcaatcagccataagaatgaacaagaaccggatcaacaatgccttctttctaaatgaccaaactctggaatttttaaaaatcccttccacacttgcaccacccatggacccatctgtgcccatctggattattatatttggtgtgatattttgcatcatcatagttgcaattgcactactgattttatcagggatctggcaacgtagaagaaagaacaaagaaccatctgaagtggatgacgctgaagataagtgtgaaaacatgatcacaattgaaaatggcatcccctctgatcccctggacatgaagggagggcatattaatgatgccttcatgacagaggatgagaggctcacccctctctgaagggctgttgttctgcttcctcaagaaattaaacatttgtttctgtgtgactgctgagcatcctgaaataccaagagcagatcatatattttgtttcaccattcttcttttgtaataaattttgaatgtgcttgaaagtgaaaagcaatcaattatacccaccaacaccactgaaatcataagctattcacgactcaaaatattctaaaatatttttctgacagtatagtgtataaatgtggtcatgtggtatttgtagttattgatttaagcatttttagaaataagatcaggcatatgtatatattttcacacttcaaagacctaaggaaaaataaattttccagtggaggatacatataatatggtgtagaaatcattgaaaatggatcctttttgacgatcacttatatcactctgtatatgactaagtaaacaaaagtgagaagtaattattgtaaatggatggataaaattggaattactcatatacagggtgggattttatcctgttatcacaccaacagttgattatatattttctgnatatcagcccctaataggacaattctatttgttgaccatttctacaatttgtaaaagtccaatctgtgctaacttaataaagtaataatcatccaaaaaaaaaaaaaaaaaaaaaaaaaaaaaaa

SEQ ID NO: 238 - DNA, 628 bp, Homo sapiens
  misc_feature (50)..(50): n equals a,t,g, or c
  misc_feature (55)..(55): n equals a,t,g, or c
  misc_feature (543)..(543): n equals a,t,g, or c
  misc_feature (594)..(594): n equals a,t,g, or c
  misc_feature (617)..(617): n equals a,t,g, or c
aaacgtcacttttaggtgacactatagaaggtacgcctgcaggtaccggntccgnaattcccgggtcgacccacgcgtccgcacgtcagggggcagtcattgctacggggaatactaaatgatggcatgagaagagaaaggggtgctgtccaacaagaggttttggaaggaggcttctggaagtgtgagctgggagcaggggtttggggaggcatctccaggagctatgtggttgtctcccgtgccaggagtttgtgctgctgtactagcattgagcttctggattgcaaagttcccaggagagggaacagccattgcaaaggctctggggcgcctgaagtaatccaggaacagctgggtacctggtgaggggaaggtggagtggtgagggccaggaggtgatgcagggaggtgccacagggagcctgctgggmcctgtggctgaggcggggctttggcttttgcactgagagaagtgggagaggacttgactcgggttcccatgctccccctggtggccatgtggtgamcagatggtggcangtkagtgagaactccagtccaggacagtggtgaccatgcagggatcaggangcaagcggtggttggatttgganggcttcctgaa

SEQ ID NO: 239 - DNA, 1932 bp, Homo sapiens
aatttttttttttttttttttttttttgaaaaaaaaaatgggtagtgtatattttgcaggtttaagacaactcaggacaataaaaacaatggactttacatgtgtatatatatagctctcttaggcaccataatcagtatgagccaacaatatttaaacttgattcaggccacattcagacatttgctcttatatacaaatatttaaattaaatacaatctgaaatgtgttctgttacatacaaaaaaggaaaaactatacaacgcagagcagtgtgtgtgttttaaataattacatttacatgtaagctaaatggaaccagcaatggtgctcaagtttttatcatcccttccagaaaatctttttctaccatctcttctattttttgcctggctttgctggaacatggtttgtggttctccagtttcatgtccttattagggaaggcatttgagtagaggataggactccctgagtgtcctccacatcggcttgtgactttgctgttgaagacttgactgagcacattgaagaacggcaggagctgctccatactgcgcacggtgcagatggtgagcagcaagtgccctggctcccaacccaatgttctccctgagttgtcttcctctggatttttctgcagaaaacaaaaagtgaactggtattaatacaacagacaatgtggtatgttagaaaaattaaaaatatataaactttggcaattggtcaagaaatgaatacaaatgacattaagtttctaactcctgacctgatcaaaacccttggtgcttctgagaccttttactgccatttattagttttacatggagcagtctaacattgtagtaatagttcccaactagaatgcgcagataagcttagttaacagaaatagctttgaacaggaatagagtcaaacataaaagttttatgttgtgctttgtatttactcaaaaagctcccaggtttctgaaccctcactactgtaaccaaggactaggtcacaaaattactacagaaaaaaggaacaaagtgctttatacatttcataatatatccccttttattataattagttaattcccttttatctaaatggcctaaatttgccatgatggtagcagtgtccaaagtgaataattactgtcagtactgcatcacagagaaaggaagggatccctcaggagacactgctgtctccttctgggttgtgctaaacaacatagggaggaaagctggacctggagtcaaaggaattgagttagtgtgctggctctgccatacttacggcacccttgggcaggatatacaaaggttcctcacttataaaatgggacagtctaaaactaccttttagtagagaagtcaaatgagaaggtatgtgaaaactctgtcaactaaatataaagactaataatttgggtattaagaggctagtttgagaagccacctgaattacacaaacacagctacagacatcattctgtctagagaaagataagagagaacaggttggttgaacttgggcagaatcacagatacaattccacactaaagaatgaaaataagcaatgaactagacagaaggaagaaatcatgaagacttaggaagcagaattacaatctgtcatattaacaaatggagtttgccttctaagatcagatgttgctcagaaactttcattgtttacctaataatttaatatcactagtttcctagtgggtcaagcagatgcaaaatccagcttattttcttctatgtgctctcaagcttattgcttattttaaagtaaaatcctgaaaaaggaaaatattaggttggtgcaaacgtaattgcggtttttgcattgttgaaatttgccgttttatattggagtacattcttaaataaatgtggttatgttatacaaaaaaaaaaaaaaaaaactcgag

SEQ ID NO: 240 - DNA, 997 bp, Homo sapiens
  misc_feature (855)..(855): n equals a,t,g, or c
  misc_feature (881)..(881): n equals a,t,g, or c
  misc_feature (916)..(916): n equals a,t,g, or c
  misc_feature (957)..(957): n equals a,t,g, or c
attggaagttgttttgcaacctgggcttttatacagaagaatacgaatcacaggtgtgtgagcatctacttaattaatttgcttacagccgatttcctgcttactctggcattaccagtgaaaattgttgttgacttgggtgtggcaccttggaagctgaagatattccactgccaagtaacagcctgcctcatctatatcaatatgtatttatcaattatcttcttagcatttgtcagcattgaccgctgtcttcagctgacacacagctgcaagatctaccgaatacaagaacccggatttgccaaaatgatatcaaccgttgtgtggctaatggtccttcttataatggtgccaaatatgatgattcccatcaaagacatcaaggaaaagtcaaatgtgggttgtatggagtttaaaaaggaatttggaagaaattggcatttgctgacaaatttcatatgtgtagcaatatttttaaatttctcagccatcattttaatatccaattgccttgtaattcgacagctctacagaaacaaagataatgaaaattacccaaatgtgaaaaaggctctcatcaacatacttttagtgaccacgggctacatcatatgctttgttccttaccacattgtccgaatcccgtataccctcagccagacagaagtcataactgattgctcaaccaggatttcactcttcaaagccaaagaggctacactgctcctggctgtgtcgaacctgtgctttgatcctatcctgtactatcacctctcaaaagcattccgctcaaaggtcactgagacttttgcctcmcctaaagagaccaaggtyagaaagaaaaattaagangtggaaataatggctaaaagacaggntttttgtggtaccaattctgggctttatgggaccntaaagttattatagcttggaaggtaaaaaaaaaaaaagggngggcgctctagaggttccccgaggggccagcttagggtgc

SEQ ID NO: 241 - DNA, 437 bp, Homo sapiens
  misc_feature (422)..(423): n equals a,t,g, or c
  misc_feature (427)..(427): n equals a,t,g, or c
  misc_feature (437)..(437): n equals a,t,g, or c
gaattcggcacgagggcggcaccagggagcctgggcgcccggggctccgccgcgaccccatcgggtagaccacagaagctccgggacccttccggcacctctggacagcccaggatgctgttggccaccctcctcctcctcctccttggaggcgctctggcccatccagaccggattatttttccaaatcatgcttgtgaggaccccccagcagtgctcttagaagtgcagggcaccttacagaggcccctggtccgggacagccgcacctcccctgccaactgcacctggctcacaaaaagagtgcaacaaatgcttctattccatagctacggcattgctcagtaagttgaggtcaaaaataaaggaatcatacatctcaaaaaaaaaaaaaaaaaaaaaaaaaaaaaaaaaaaaaaaannaaanaaaaaaaaan

SEQ ID NO: 242 - DNA, 1914 bp, Homo sapiens
  misc_feature (1889)..(1889): n equals a,t,g, or c
gtgtgagaggcctctctggaagttgtcccgggtgttcgccgctggagcccgggtcgagaggacgaggtgccgctgcctggagaatcctccgctgccgtcggctcccggagcccagccctttcctaacccaacccaacctagcccagtcccagccgccagcgcctgtccctgtcacggaccccagcgttaccatgcatcctgccgtcttcctatccttacccgacctcagatgctcccttctgctcctggtaacttgggtttttactcctgtaacaactgaaataacaagtcttgatacagagaatatagatgaaattttaaacaatgctgatgttgctttagtaaatttttatgctgactggtgtcgtttcagtcagatgttgcatccaatttttgaggaagcttccgatgtcattaaggaagaatttccaaatgaaaatcaagtagtgtttgccagagttgattgtgatcagcactctgacatagcccagagatacaggataagcaaatacccaaccctcaaattgtttcgtaatgggatgatgatgaagagagaatacaggggtcagcgatcagtgaaagcattggcagattacatcaggcaacaaaaaagtgaccccattcaagaaattcgggacttagcagaaatcaccactcttgatcgcagcaaaagaaatatcattggatattttgagcaaaaggactcggacaactatagagtttttgaacgagtagcgaatattttgcatgatgactgtgcctttctttctgcatttggggatgtttcaaaaccggaaagatatagtggcgacaacataatctacaaaccaccagggcattctgctccggatatggtgtacttgggagctatgacaaattttgatgtgacttacaattggattcaagataaatgtgttcctcttgtccgagaaataacatttgaaaatggagaggaattgacagaagaaggactgccttttctcatactctttcacatgaaagaagatacagaaagtttagaaatattccagaatgaagtagctcggcaattaataagtgaaaaaggtacaataaactttttacatgccgattgtgacaaatttagacatcctcttctgcacatacagaaaactccagcagattgtcctgtaatcgctattgacagctttaggcatatgtatgtgtttggagacttcaaagatgtattaattcctggaaaactcaagcaattcgtatttgacttacattctggaaaactgcacagagaattccatcatggacctgacccaactgatacagccccaggagagcaagcccaagatgtagcaagcagtccacctgagagctccttccagaaactagcacccagtgaatataggtatactctattgagggatcgagatgagctttaaaaacttgaaaaacagtttgtaagcctttcaacagcagcatcaacctacgtggtggaaatagtaaacctatattttcataattctatgtgtatttttattttgaataaacagaaagaaattttgggtttttaatttttttctccccgactcaaaatgcattgtcatttaatatagtagcctcttaaaaaaaaaaaaaacctgctaggatttaaaaataaaaatcagaggcctatctccactttaaatctgtcctgtaaaagttttataaatcaaatgaaaggtgacattgccagaaacttaccattaacttgcactactagggtagggaggacttagggatgtttcctgtgtcgtatgtgcttttctttctttcatatgatcaattctgttggtattttcagtatctcatttctcaaagctaaagagatatacattctggatacttgggaggggaataaattaaagttttcacactgnaaaaaaaaaaaaaaaaaaaactcga

SEQ ID NO: 243 - DNA, 616 bp, Homo sapiens
  misc_feature (3)..(3): n equals a,t,g, or c
  misc_feature (592)..(592): n equals a,t,g, or c
  misc_feature (611)..(611): n equals a,t,g, or c
  misc_feature (613)..(613): n equals a,t,g, or c
agngacagcagttccctggcttctggaaggagtgtcggtctatccaaaaaatgtactaacagatatgtaaaccctgatgaatacagtatgtgttatgagaagtggcccaacgaagcagctcatccaagtgagattctgaagttgggctggcgagtacacgaatggctttcttactagagagaagtgggaccctgctaatctgtagcatgtggtggcatcatggttactcaaatatcactggaacagaaggtgaaagaagaaatctgaagagaaataaaacaaattttcggcggttccaagatggccgaataggaacagctccagtctacagctcccagtgtgagagatgcagaagatgggtgatttctgcatttccaactgagcaaacggsacaccagaagattatatcccatgcctggctgggagggtcccatgcccacggagcctcgctcattgctagcacagcagtctgagatccatctgcaaggtgggcagtawggctggsggaggggcacccaccattgctgaggcttgagtaggtaaacgaagcarycaggaagctcgaactgggtggagcccaccgcaactcaangaggcctggctacctctgnanact

SEQ ID NO: 244 - DNA, 708 bp, Homo sapiens
  misc_feature (14)..(14): n equals a,t,g, or c
tacggacacgaggncgaaaatgagaaaggtaacaatttcgaaaaagcatgcccttctgctgtgtttccagttgtttagatgtctgctctccatgtatatatggatcacattcgtgttagatggaagttgtggaatccactgttctctcaaaccggtctctttcccttgtacctatcatagtgtacatagctcaacttcctgagtttgattctagtgttcaaagataggtatttttcatataagatgtcctgtcaaagcaagtcattgaacttacctggtatttaactgaaaacaaacaaaaatcagcaatctcttccattgcttgtagaaatactgacttaggccaggcacagtggctcacgtctaatcccagcactttgagaggccaaggcaggagtatcatttgagcccaggagttcgagaccagcctggcaacatagtgagaccttgtctctgtaaaaaggaaggaaggaagggaaggagggaggggtggagccagaggaggggaggggacactctgttatacttatcgaaaggtgctatccaggtgtggtagtgcagccgatagtctcagctactcaggaggctgaggtgggaggatcacttgagctcaggagtttgaggctgcagtgagctatgatggtaccatgtactccagcctgggcaacagagacagaccagactcctaaaaaaaaaaaaaaaaaaaaa

SEQ ID NO: 245 - DNA, 556 bp, Homo sapiens; identical to SEQ ID NO: 120
  misc_feature (513)..(513): n equals a,t,g, or c

SEQ ID NO: 246 - DNA, 774 bp, Homo sapiens
  misc_feature (618)..(618): n equals a,t,g, or c
  misc_feature (715)..(715): n equals a,t,g, or c
gtctacctccgggctgaaacgtcaccatgcctccccacagacagacggatggacagatgggcctccctgcacctgctctgtgggtgtgggggctcctgctcagcagcagtttccagacccttctccctgctttccccaagccacccgccttgaatctggggtgctctaccagacccatcccctcatttctaaagatttgagccactagtcgtgtccctctccctcagaaatgccttggtgacacttggctgctttcaactcttccacccatctgcctcttggtctcatctttaccttctgctaaaggtcctgacccccacccccgccacgccatggggcaccccatggtggtgcgtccttgggagcagctctgtccctttccccgtggcctttgccccgcctcctatgacttcgattcccacctgtccccgacccctgggaccactgaccgggcccgatcaccctgtcactgccctgtcatctgcttaccccacacggtgctctgctgacccaggtcttgctgtctcccaayagccccacgaggcttyccgtcgctcctggacactrmaggctgagcccgctgccccgccgcctccatgaggaaggcttttcctctgngagccccaggccaccctttccctcctttaagtaattacttaagtcccttgccagggccctcccagtaccctttctaaagacacccctgccccagcangctgcaggctcctgctccactttcctctcaggccctcgtcgctgtggtgctgcctttga

SEQ ID NO: 247 - DNA, 1396 bp, Homo sapiens
  misc_feature (1187)..(1187): n equals a,t,g, or c
  misc_feature (1325)..(1325): n equals a,t,g, or c
  misc_feature (1327)..(1327): n equals a,t,g, or c
cctcgagccatgtgtccaggtggggcagatcatggagggcgcccaggtgcggtgctgaggctgagcatgcactggctggggagggtgggcagagcaggaggaaatcccttgttctccggagctggagagccagaaagagccctgcagcctgggcctcatcatcacacctcgccctcaaggcctccaggcacagcatccactgccagcctctgctcctgcctctgagggtctgtctccaaggtcttttgggggctgccccagctcccccaacacagacagcaccagagctgggcccacctgtgaggtgctgagttccccatctcagagactgtgcgagcagaggcagggaggcgcttgatgtcggatggagaaaggacaggggaggggtgtggggctcagggccccgccaggtgaaggaacaagcttggaagggtgtccttatgtctgagagttggggagacacccccaagccccagatggrcctcgaatgccaggcagggccaagctgggcccagaagtgggawggwtcccttggctgccccaggaatgcaggttccggggcaagaatccagccctggctggttgaagtccatcccaagtctccctccccacgaggctcctgcagatgccaggaatggggctggattccagattccaagcctggcsgcccagcccctatctgggaccccagcccagagcccccaggcctggcctccaacctggccccagcctcaggggagctgaattcagagaatcctgtcctaggagccagaagcgggggagggaggragggcggccctgtcctgggtgcaggcccgggggctgggggytgcccgcccgtctgggtcagccgcagctgcaaaccggccctggctgagtcatggsgcctccatctccagggcctggcttgaggtggggaatagcagtgaggttggacatccaggcacctgagggtgggcagggctccctgcggctggggtggccagtggcacctggctgttgcccccctgcaccccagccctttggcccccaagtctctgccacctccctggggttctgctcccatattcctcacacccagcacagaacccagcatgtctcctgtagacacctgcatataaaccctgactcacacacacacacacacacacacacacgcacacatgcaggccaggctcctcggccangtcaccctaccggcagagctctagacatttctggcctctggtgactattcttcaggcagctcaccctgcaagtctttattgagcacctactgtgtgccaggcagtggtacagcaagggcagaagccccacctccaagnanctgaacccctgccgtggcagagacagaaaacaaaggcagcaccacggcgacgagggctaaagagaacgc

SEQ ID NO: 248 - DNA, 1274 bp, Homo sapiens
gcccacgcgtccgctgttgctcaaaggaaataggagttggtgtgcttgtgaccaaggggttacacttmcagcttttaaaattctcctttacatgtgctcagtgttttgktttgtgttttggtttctgttttttattttaattcccacattgggcacaagaatcagaatatggatagctagtttaagaaacttttgtgggtgcactgtagcatagatgacagaatttgatgttccccccatctccaattcagttcagggcattccacagttaaacagaaatgggaacgtggggctcttataaatgaatgggcgctcacagttttggttttcagctcttcatgtctgtaagtgtgctttggggraggctatgtctgtatggtcgattctcagttatcacatttgcctctcctcccactaccttcatgamcattcagtgctgttcgcactgcagttagagagaagggacggacagttggtgacactcagccacattgctacttttatctgttctggtaagaagttagatagatggtagattgaagcaattgggtagaattagttgggggaatatttatgagttgctgtgtttgttgattagttccatctctttcccattttaactgagaattgattatatatagctctaagtatataggtatttaaacaaccccacaagcggctgtatcagtaacatttattaattccactatagtgagggaggatttccattctaaataccttattttgagggatttataaaacttagttgtaaaagagaaagcccacatagtgggaataaattgcttcagccatttttagtatttgagagcactagggaagatgtttagtagctgtgtggatgccttttttcacaccctgtctattgaatgctgcatccattcacgaagttaaatgttacatgcagttagtccttaatgtggactggatctgtacttttgttttggattaaaacatttaaagatttttgaagtgcagctactccccacgtgcatttgmtacacataaaagtcatactgtgtgtgcacaaagagtacatggattttccagcataytgctttaaaaaattatataaactgttaaaatattaacacctcaggctacctgctgtattctgtcccattgacccctggaattggatttactgcaagtgattgataattcaattatgtggcttttcccctttaatcttgccatttaaattacagtagaaagacaaaatcaagtaaaataaagtgttagataatagaaagagt

SEQ ID NO: 249 - DNA, 652 bp, Homo sapiens
  misc_feature (392)..(392): n equals a,t,g, or c
aattcggcacaggggggccaccacacccggcctgtacatgctgttttgcatcttgctttatacgttggggagtgccagatgtcaccatctttcgttcttcctctggggctggtcaaatccccctgagaaaactcctctggcctcctggcggggggtgaaggccaggctgccagggccaggctgccagcttctgggagctgcaggggcagaggcagggagctgtcaggcattcagccagcaagacgcactcagtacccacttggggttcagaatccccctccctcatcttcagatgggccagatgtccccaaagccagcggcccctttctgtttcaccctgtctacagaataaacccccagtcactgggggtgggggaagagtaaggggagangggaaacgagatttggaggtctagctgctgctgaaacagccctcagttcgtctttattttgccttctgcaaaactggcctggtgttgccagctccttttgaggactttgctamcggttctcagcatccctcaattgctggcttaggattcatgggtttttaggggtggggtgggattagcatgtccagctgctttccagtttccaaagttctgtccctatcatattgcctctgatttaaaaaaaaaaaaaaaaaactcga

SEQ ID NO: 250 - DNA, 1124 bp, Homo sapiens
gattgcctacaaatgtcagaggtataatggtttggttttcatgctggcttctcacacagtccatcacagtgattcttggagccagagggaggtatggaagactgtgtgttctccaagggaggcactgtggtctggtggataagagtgggagtcccaatcctttctccgcagatgtgctagctgtgcactctgggcaagtttctcactctcctgagcctcagcgtctttatcaatatgacgagaataaatacagcacctgcctacctcatggggttgtttcagcagtcaatgagatcatgtatatgaagcatttagtatacctagcacctaataaaagctcaacaaccagtagtcttattactaacaaaatggagctagaaggatgcattagtttaaacaaaatcttgaggcagatactgggagtacctgtctttattcttcaacttgagtctcctcccagtttgtttggataaaaactcaaatgtaatatttttaatttgggtaaaagaacttctgagaaagggttgaacatctatccacttgcctttttatgcctagggaactagagatacttgttggcggcatcgcaaatgttgctgacttatgaagtactgcagtatctgaatacctttttgtaggataatctaaagtttccaaaaaatagtatagtgttgtagtgaagaacttggactcttaagccagattattttgttcagattcagaaatcccctccactccacccactggctgtatagccttgcccaaatcactgaatctctgtgtgtctgcgtcctggtgtgtgaaatgaggacaatagtagctattgggtagggttggcctggggtctaagtgatgactgcctgtaaggtgtttagaacagtatttggtaaacaactggcactcaatcagtgttgctgtgattatgatgatttattccaaggttgcttgctttccagtacatcatagactactacttgaccaaatttactagcaatggagtacctgaaagttttacatgtgcacatttgcatgaaaaccccacaaaatttccctttgaacagtgaaggggacggcacaaagataattcttggcactaagcttaaaaaaaaaaaaaaaaaactcga

SEQ ID NO: 251 - DNA, 3095 bp, Homo sapiens
ccacgcgtccgtccttccgcagagaacgtggccagaagtgttgtattaggaagcaagtaagaaagaaaaggaaaaaaaaaagaaatcttgcatttgacacatgaaaaagtaactaaaagcttgcacggagatatattaagcccttgcactaaaaatgctggtactgtttaaattcctcccgttgacttcaagtgggcgctttttatccgtaacattgtatcaccgggtgcaccaccagacgtttttcgcaggagcgaagtcattctctccggcgtctacacttaacttgtatatttgttctagccaatttcagtcacttcagaaactttactgtggcgtaattccagttcttaggtacgcgagcatagagtgaaaaaatagctgtgattgttcttatgtaaaaatcaaagctccaatggaagttaatgaatacctttgtaataatggaatctatttgccctttatttcttaatcttctgttttaaactgctgctattaaaaacacacccatgttattaggtttacggaagttgagctgtcgttcaagttcttggcgtccggaaaggtgtccgtgccatgggcttgtgacccggtcctggatacaccagaaacatcaccttcttgccacctaaaagagaatcgcactcacaaacgctgtcacaaccgtctttatgacatcaatctcccttgttccggttctctttttacaaaaaagaatttacttcattaaacaatttccgtctctagtttaaacagaaggtggaaaaaaatagaccccggtctagactcattttctccagtccacattggaatgggtttaagaatatcctcttccaaacaaaacaagacgatttgtactttgtgtctaagatgtctaagatgaaacgtttaaaactctgattaccacaattttggattttttgttaaaatcaaatgtattttcaaacttactgtgttacaatattatagttaaaaagtacagggagagcagaagccctgatctaagaggtgagtcattgtcctcatgttgctgctaacttgaattgcagaagagaaaatctcagtgccttctgcctggctttttgatggagtttgcttaacacccttcatctttctgtttctctccatgtaactaaatgacgttttaaaaattcagtgctgaggtgtctgggtagcacagcggttgagcctccgatttttggtttcaactcaggtcacgatctcagggtcatgggatcgagccccacaacaggctccacgctcagccgggagtgtgcttaagtttctcgctctgcccctgcccttccccttcccctgctgcgtgcacctatgcactctctctctcaaataaacaaataaatctttaaaaataaataaataaaacacagtgcataccataaaacattaagtaatatgcgttagggaagcatttgagatcatgcatagcttatatatttcaaaaaggatttgttcacatcagtacaatagatagatataaaagaagcaattcttggagcgtctgggtaaagaaggtagtgctccggctcagcaggctttcccgtcaagccactgatctccacccggctctcccgtgttcctcttcaataactgagtgcagtctatgagcagatgctgccttctgccacataaagtatccttaacttttactttgctttgagtttaaaccagcattgaaatgtaaatcacgtcttcctcatgcatgaaattgtgagggaagtcagagaggttctctaagagtttatttagcaatgaggaaacaggacaaagaggaggtagtcccatagtggggagggtgggaggcggggtctgccgggcagcactgggtccagcgtctccctttccctagctttctcccaattttctttaggaaaaatgatgtcatagtgagatttcctataacagaatgtttctaaggttcactgtatggacccagaccccagacggttgtcttataagcgaacttagaacggatgctgggaactaagtacttgagtgttgacttgctcacctgcgtgggacagagggacaagccagcaagcccccatgaagtgacgggcagccccacctgggccctggagagaccgacgcaccctctcagctggggtgcagagaaaggattggtttgggggatagcagtggactgtcagaagaacttacgggatcctattgtaatgtaagctatgaatcaggcttgctgtcctgggactgaggttgtaacccgtgaacgacgcaccaacacaggcagctgatgcgtttgctttggcttccaatttgctaatataaaaatctagacttgtttcatgaaaacaggacatttaaacattctatgaatattctccaaaaatatttggggaaacctatgtacacatttctgttggactgacacctagaaatcaaattgttgtgacagaggatgtgcctatgttcagcttcagtaaatactgccggagagatctctgaatgataaacagttaacggaaaatcgcaccaaaccaggctgttggaggcaacaacccattgggctagtttctggtggcctgctgaaccacgcagccaacactgggcttcagactgcacgggactctctttgtccacctgtcctgtgcctggccccacaccaggatgctggcgattatcaaattcactttactggtgattacctttgagcatatttgctttcacaaatcagttctgtaactttgtgtgcattgggctaaattttacaaactaatcattggttaaaaggaagtggcctaaggtccccagtcttgctgatatcagggcagctgctcctttggggttcctcgtcttccatgggtgaagcatgggagtgaggggccccataggggggtcagcgatgccacacttgggggctgtccctgctcagctatgggcagacctactttttaggtttggtttgaggtcctcaccatcaccactgtccttattcaagtaaactaagtctttggttattttaaaattaatgcaatgaaattatgttttagatcattattaagattattaaaaataaagacaaataaaatcatatatgcatattaaaaaaaaaaaaaaaa

SEQ ID NO: 252 - DNA, 518 bp, Homo sapiens
  misc_feature (388)..(388): n equals a,t,g, or c
  misc_feature (414)..(414): n equals a,t,g, or c
  misc_feature (458)..(458): n equals a,t,g, or c
  misc_feature (501)..(501): n equals a,t,g, or c
tcgacccacgcgtccggcacgktcgccaggcaccgctgaccgaggcctgctgggattccagaattggagagggaggcaccatgaagactctcctgctgctggtggggctgctgctgacctgggagaatggacgggttctgggagaccagatggtctcagacactgagctccaggaaatgtccaccgaggggagtaagtacattaatcgggaaattaaaaatgctctcaagggggtgaagcagataaagacactaatagaacaaacaaacgaggagcgcaaatccctgctcaccaacttggaagaagccaagaagaagaaagaggatgccctgaatgacaccaaggattcagaaatgaagctgaaggcgtccccaggggttttcaatgncacccttgatggccctctgggaggantttaagcccttccttgaaaacagacctgtattgaagttctaagncccgagtcttccagaagccagccacaaggcttggtttggccanccaggtttgaaggagtt

SEQ ID NO: 253 - DNA, 518 bp, Homo sapiens
  misc_feature (388)..(388): n equals a,t,g, or c
  misc_feature (414)..(414): n equals a,t,g, or c
  misc_feature (458)..(458): n equals a,t,g, or c
  misc_feature (501)..(501): n equals a,t,g, or c
tcgacccacgcgtccggcacgktcgccaggcaccgctgaccgaggcctgctgggattccagaattggagagggaggcaccatgaagactctcctgctgctggtggggctgctgctgacctgggagaatggacgggttctgggagaccagatggtctcagacactgagctccaggaaatgtccaccgaggggagtaagtacattaatcgggaaattaaaaatgctctcaagggggtgaagcagataaagacactaatagaacaaacaaacgaggagcgcaaatccctgctcascaacytggaagaagccaagaagaagaaagaggatgccctgaatgacaccaaggattcagaaatgaagctgaaggcgtccccaggggttttcaatgncacccttgatggccctctgggaggantttaagcccttccttgaaaacagacctgtattgaagttctaagncccgagtcttccagaagccagccacaaggcttggtttggccanccaggtttgaaggagtt

SEQ ID NO: 254 - DNA, 1670 bp, Homo sapiens
ccacgcgtccggcacggtcgccaggcaccgctgaccgaggcctgctgggattccagaattggagagggaggcaccatgaagactctcctgctgctggtggggctgctgctgacctgggagaatggacgggttctgggagaccagatggtctcagacactgagctccaggaaatgtccaccgaggggagtaagtacattaatcgggaaattaaaaatgctctcaagggggtgaagcagataaagacactaatagaacaaacaaacgaggagcgcaaatccctgctcaccaacttggaagaagccaagaagaagaaagaggatgccctgaatgacaccaaggattcagaaatgaagctgaaggcgtcgcagggggtgtgcaatgacaccatgatggccctctgggaggagtgtaagccctgcctgaaacagacctgggggaagggtctacgcccgagtctgcagaagcagcacagggctggttggccaccaggttgaggagttcctgaaccagagttctcccttctacttctggattaatggcgaccgcatcgactccctgctggagaacgaccggcagcagacccacgccctggatgtcatgcaggacagtttcgaccgggcatccagcatcatggatgagctgttccaggacagattcttcacccgtgaggcccaggaccctttccacttctcacccttcagctcattccagcggaggccttttttcttcaatatcaagcaccgctttgcccggaacataatgcctttccctggctaccagcccttgaatttccacgacatgtttcagcccttcttcgacatgatacaccaggctcagcaggccatggatgttaacctgcacagactcccccactttccaatggaattcacagaagaagacaaccaggacggcgccgtgtgcaaggagatccgtcacaactccacagggtgcctgaagatgaaggaccagtgtgaaaagtgccgggagatcttgtctgtggactgttcgtccaacaaccccgctcaggtccagctgcgacaggaacttaataattccctccagattgcagagaagttcaccaagcttgtacgacgagctgctgcagtcctaccaggagaagatgttcaacacgtcctccctgctgaagcagctggacgagcagtttagctgggtgtcccagctggcgaatctcactcagactgaggacccgttctatctccaggtcacgacggtgagttcccagacttctgactccagtgctccctctggcgtcactaaggtggttgtgaagctctttgattccgaccccatcaccgtgatcctcccagaagacctctccaggaacaatcctaaatttatggagaccgtggcagagaaagcccttcaggaataccgccagaagagccgggaggagtgagatgggaacactgcctctccacatggcaggtgtctgagttctgtcgcccccgcgatgagcgataggcccctagagagagctctgcatgtcaccgagtgaccgggccttccttgaggccctcctgtcccctcaccccgcctgtcctccctctggactctgcattgtaacaccgtgttcactgatcatgggaagaactcctgtgtgccactaactcaataaaaccaccagtaatctgaaaaaaaaaaaaaaaaa

SEQ ID NO: 255 - DNA, 606 bp, Homo sapiens
  misc_feature (591)..(591): n equals a,t,g, or c
  misc_feature (593)..(593): n equals a,t,g, or c
  misc_feature (600)..(601): n equals a,t,g, or c
  misc_feature (605)..(605): n equals a,t,g, or c
ctttttttttttttttttcagattactggtggttttattgagttagtggcacacaggagttcttcccatgatcagtgaacacggtgttacaatgcagagtccagagggaggacaggcggggtgaggggacaggagggcctcaaggaaggcccggtcactcggtgacatgcagagctctctctaggggcctatcgctcatcgcgggggcgacagaactcagacacctgccatgtggagaggcagtgttcccatctcactcctcccggctcttctggcggtattcctgaagggctttctctgccacggtctccataaatttaggattgttcctggagaggtcttctgggaggatcacggtgatggggtcggaatcaaagagcttcacaaccaccttagtgacgccagagggagcactggagtcagaagtctgggaactcaccgtcgtgacctggagatagaacgggtcctcagtctgagtgagattcgccagctgggacacccagctaaactgctcgtccagctgcttcarcaggragracgwgttgaacatcttctcctggtaggactgcagcagctcgksgtgggtgcctnanacaacannctana

SEQ ID NO: 256 - DNA, 841 bp, Homo sapiens
  misc_feature (20)..(20): n equals a,t,g, or c
  misc_feature (29)..(29): n equals a,t,g, or c
  misc_feature (34)..(34): n equals a,t,g, or c
  misc_feature (57)..(57): n equals a,t,g, or c
  misc_feature (101)..(101): n equals a,t,g, or c
  misc_feature (703)..(703): n equals a,t,g, or c
  misc_feature (779)..(779): n equals a,t,g, or c
cttagtacgccaaaggaacnctgaatcanaagcntggacctcaccgtcgtgacctgnagatagaccgggtcctcagtctgagtgagattcgccagctgggnccacccagctaaactgcttcgtccagcttgcttcagcaggaagacgtgttgaacatcttctcctggtaggactgcagcagctcgtcgtacaagcttggtgaacttctctgcaatctggagggaattattaagttcctgtcgcagctggacctgagcggggttgttggacgaacagtccacagacaagatctcccggcacttttcacactggtccttcatcttcaggcaccctgtggagttgtgacggatctccttgcacacggcgccgtcctggttgtcttcttctgtgaattccattggaaagtgggggagtctgtgcaggttaacatccatggcctgctgagcctggtgtatcatgtcgaagaagggctgaaacatgtcgtggaaattcaagggctggtagccagggaaaggcattatgttccgggcaaagcggtgcttgatattgaagaaaaaaggcctccgctggaatgagctgaagggtgagaagtgsaaagggtcctgggcctcacgggtgaagaatctgtcctggaacagctcatccatgatgctggatgcccggtcgaaactgtcctgcatgacatccagggcgtgggtctgcnaccggtcgttctccagcagggagtcgatgcggtcgccattaatccagaagtagaagggagaactctggttcagganctcctcaacctggtggccaaccagccctgtgctgcttctgcagactcgggcgtagacccttc

SEQ ID NO: 257 - DNA, 868 bp, Homo sapiens
  misc_feature (1)..(1): n equals a,t,g, or c
  misc_feature (23)..(23): n equals a,t,g, or c
  misc_feature (31)..(31): n equals a,t,g, or c
  misc_feature (45)..(45): n equals a,t,g, or c
  misc_feature (829)..(829): n equals a,t,g, or c
  misc_feature (860)..(860): n equals a,t,g, or c
ntttcagcagttccgcatgcccntccgtggnaagcctgttcgtgntattgggcaagaacccccatgatgcccaaggccatccaagggcatctgaagaccaacccagctctggaaaacctgttacttcatatccgggggaatgtggctttgtgttcaccaaggaggcctcacttgagatcagggacatgctgctggccaataaggtgccagctgccgcccgtgctggtgccatagccccatgtgaggtcactgtgccagcccagaacactggtctggggcccgagaagacctccttcttccaggctttaggcatcaccactaaaatctccagaggaaccattgaaatcctgagtgatgtgcagctgattaagaccggagacaaagtgggagccagtgaagccacactgctgaacatgctgaacatctcccccttctcctttgggctgatcatccagcaggtgtttgacaatggcagcatctacaaccctgaagtgcttgacatcacagaggaaactctgcattctcgcttcctggagggtgtccgcaatgttgccagcgtatgtctgcagataggttacccaactgtggcatcagtgccccattctatcatcaatggatacaagcgggtcctggctttgtctgtggagactgattacacctttccacttgctgaaaaggtcaaggccttcttggctgatccatctgcatttgtggctgctgcccctgtggccgctgccaccactgctgcacctgctgctgctgcagccccagccaaagttgaagcaaaggaagagtcggaggaawcggatgagagkattktcamttcganaatcagcaaaagcaacaattccagccagttnattgtgaa

SEQ ID NO: 258 - DNA, 2075 bp, Homo sapiens
ccacgcgtccgtggggccgagcgccgctgggtaggcggaagtagccgcagatggcggcggctatgcccttgctctgctcgtcctgttgctcctggggcccggcggctggtgccttgcagaacccccacgcgacagcctgcgggaggaacttgtcatcaccccgctgccttccggggacgtagccgccacattccagttccgcacgcgctgggattcggagcttcagcgggaaggagtgtcccattacaggctctttcccaaagccctggggcagctgatctccaagtattctctacgggagctgcacctgtcattcacacaaggcttttggaggacccgatactgggggccacccttcctgcaggccccatcagacactgaccactactttctgcgctatgctgtgctgccgcgggaggtggtctgcaccgaaaacctcaccccctggaagaagctcttgccctgtagttccaaggcaggcctctctgtgctgctgaaggcagatcgcttgttccacaccagctaccactcccaggcagtgcatatccgccctgtttgcagaaatgcacgctgtactagcatctcctgggagctgaggcagaccctgtcagttgtatttgatgccttcatcacggggcagggaaagaaagactggtccctcttccggatgttctcccgaaccctcacggagccctgccccctggcttcagagagccgagtctatgtggacatcaccacctacaaccaggacaacgagacattagaggtgcacccacccccgaccactacatatcaggacgtcatcctaggcactcggaagacctatgccatctatgacttgcttgacaccgccatgatcaacaactctcgaaacctcaacatccagctcaagtggaagagacccccagagaatgaggcccccccagtgcccttcctgcatgcccagcggtacgtgagtggctatgggctgcagaagggggagctgagcacactgctgtacaacacccacccataccgggccttcccggtgctgctgctggacaccgtaccctggtatctgcggctgtatgtgcacaccctcaccatcacctccaagggcaaggagaacaaaccaagttacatccactaccagcctgcccaggaccggctgcaaccccacctcctggagatgctgattcagctgccggccaactcagtcaccaaggtttccatccagtttgagcgggcgctgctgaagtggaccgagtacacaccagatcctaaccatggcttctatgtcagcccatctgtcctcagcgcccttgtgcccagcatggtagcagccaagccagtggactgggaagagagtcccctcttcaacagcctgttcccagtctctgatggctctaactactttgtgcggctctacacggagccgctgctggtgaacctgccgacaccggacttcagcatgccctacaacgtgatctgcctcacgtgcactgtggtggccgtgtgctacggctccttctacaatctcctcacccgaacctttccacatcgaggagccccgcacaggtggcctggccaagcggctggccaaccttatccggcgcgcccgagtgtcccccccactctgattcttgccctttccagcagctgcagctgccgtttctctctggggaggggagcccaagggctgtttctgccacttgctctcctcagagttggcttttgaaccaaagtgccctggaccaggtcagggcctacagctgtgttgtccagtacaggagccacgagccaaatgtggcatttgaatttgaattaacttagaaattcatttcctcacctgtagtggccacctctatattgaggtgctcaataagcaaaagtggtcggtggctgctgtattggacagcacagaaaaagatttccatcaccacagaaaggtcggctggcagcactggccaaggtgatggggtgtgctacacagtgtatgtcactgtgtagtggatggagtttactgtttgtggaataaaaacggctgtttccgtggttaaaaaaaaaaaaaaaaaaaaaaaaaaaaaaaaaaaaaa

SEQ ID NO: 259 - DNA, 2645 bp, Homo sapiens
  misc_feature (1324)..(1324): n equals a,t,g, or c
  misc_feature (2645)..(2645): n equals a,t,g, or c
tcgacccacgcgtccggtaatcttcaaatatgcgcatggcgagtattatggtctgggtgatgatcatcatggtgattctggtgctgggctacggaatatttcactgctacatggagtactcccgactgcgtggtgaggccggctctgatgtctctttggtggacctcggctttcagacggatttccgggtgtacctgcacttacggcagacctggttggcctttatgatcattctgagtatccttgaagtcattatcatcttgctgctcatctttctccggaagagaattctcatcgcgattgcactcatcaaagaagccagcagggctgtgggatacgtcatgtgctccttgctctacccactggtcaccttcttcttgctgtgcctctgcatcgcctactgggccagcactgctgtcttcctgtccacttccaacgaagcggtctataagatctttgatgacagcccctgcccatttactgcgaaaacctgcaacccagagaccttcccctcctccaatgagtcccgccaatgccccaatgcccgttgccagttcgccttctacggtggtgagtcgggctaccaccgggccctgctgggcctgcagatcttcaatgccttcatgttcttctggttggccaacttcgtgctggcgctgggccaggtcacgctggccggggcctttgcctcctactactgggccctgcgcaagccggacgacctgccggccttcccgctcttctctgcctttggccgggcgctcaggtaccacacaggctccctggcctttggcgcgctcatcctggccattgtgcagatcatccgtgtgatactcgagtacctggatcagcggctgaaagctgcagagaacaagtttgccaagtgcctcatgacctgtctcaaatgctgcttctggtgcctggagaagttcatcaaattccttaataggaatgcctacatcatgattgccatctacggcaccaatttctgcacctcggccaggaatgccttcttcctgctcatgagaaacatcatcagagtggctgtcctggataaagttactgacttcctcttcctgttgggcaaacttctgatcgttggtagtgtggggatcctggctttcttcttcttcacccaccgtatcaggatcgtgcaggatacagcaccacccctcaattattactgggttcctatactgacggtgatcgttggctcctacttgattgcacacggtttcttcagcgtctatggcatgtgtgtggacacgctgttcctctgcttcttggaggacctggagaggaatgacggctcggccgagaggcnttacttcatgtcttccaccctcaagaaactcttgaacaagaccaacaagaaggcagcggagtcctgaaggccccgtgctccccacctctcaaggagtctcatgccgcagggtgctcagtagctgggtctgttcccccagccccttgggctcacctgaagtcctatcactgccgctctgcccctccccatgagccagatcccaccagtttctggacgtggagagtctggggcatctccttcttatgccaaggggcgcttggagttttcatggctgcccctccagactgcgagaaacaagtaaaaacccattggggcctcttgatgtctgggatggcacgtggcccgacctccacaagctccctcatgcttcctgtcccccgcttacacgacaacgggccagaccacgggaaggacggtgtttgtgtctgagggagctgctggccacagtgaacacccacgtttattcctgcctgctccggccaggactgaaccccttctccacacctgaacagttggctcaagggccaccagaagcatttctttattattattattttttaacctggacatgcattaaagggtctattagctttctttccgtctgtctcaacagctgagatggggccgccaaggagtgccttccttttgctccctcctagctgggagtgacgggtgggagtgtgtgtgcccaggtgggggtgtctcctggctgggaaggagggaaagggagggagagttttgcgggggttggcagtggagagcaggctggagaggagatggctaatagctgtttaatggaaacctgctgggctggagggagttaggctgaatttcccgacttcctctgccagttattgacacagctctctttgtaagagaggaaagaaactaaacccacccaagggatgatttcagggggagaggtggagggcagatgtcctgggcaaaccgggcccctctgcccacacacctcacttgatccttttgccaaacttgtcaaactcaggggaactggcttcccagttgcccctttgccatattccaagtccccctcagacttcatgtctctgctcatcagcactgtcccaggatcctggagagggagaacccctggccccaggggaaagaggggggggtctcccgtttcctgtgcctgcaccagccctgcccccattgcgtctgcacacccctgcgtgtaactgcattccaaccactaataaagtgcctattgtacaggtmaaaaaaaaaaaaaaaaaaaaaaaaaaaaaaaaaaaaaaaaaaaaaaaaaaaaaaaaaaaaaaaaaaaaaaaaaggggggggn

SEQ ID NO: 260 - DNA, 1098 bp, Homo sapiens
  misc_feature (74)..(74): n equals a,t,g, or c
  misc_feature (346)..(346): n equals a,t,g, or c
  misc_feature (1085)..(1085): n equals a,t,g, or c
  misc_feature (1093)..(1093): n equals a,t,g, or c
  misc_feature (1095)..(1095): n equals a,t,g, or c
ggcggcccgggagggtgccccgccgccctgccccaccagtgccattggaagggccagcctgagcctccgggacnagggtcggggcctgcgcgatgcaagacgggagaaaaggaggggcgtacgcgggcaagatggaggcgactacggctggtgtgggccggctagaggaagaggcgttgcggcgaaaggaacggctgaaggccctacgggagaaaaccgggcgcaaggwsagaagtgkggagtgagggtcgcagttgaggcgtccagcgttcggggtccgggtcgcgcttgaggagagcaaagggctaataaggaaagacagctgccgagggcgcgcatgccgggncgctaacgcatgcgcgagaagacgggcgccctcccacgatgtctggggctgcttggcgtgggactcctctggcgctggtgcggtcgtcgcgcacgcgcgggggtgggcaargcagtggtcagcgacccgcagtccatctgactcctgcttcccgggtgttgctcgtgtaggtatctagggctgcctgtaggttcagatgcttgttgggttaggcgtgatttgttccgttcctctatggcctagctggtctttaacccccgccttcgattctgagtcagacagactccccagtccggcagcactccttggacagggcagcaagtgatagcagtgggtatacagccggagtcgtttcgtgcaaaaatcaaaaagaggccgggcacggtggctcacgcctgtaatcccagtgctttgggaggccgaggcaggcggatcacttgaggttagtagttcgagaccaggctgggtaacatggtgaaaccccgcctctactaaaaatacaaaaattagccgggcgtggtggtgcgcgcctgtaatcccagcttctcgggaggctatggcaggagaaccgcttgagcctgggaggtcagaggttgtagtgagtccgagatctcgccactgtactccagcctgggcaacagagcgagatccgtctcaaaaaaaaaaaaaaagggcggccgctctagaggattccctcgaggggctcaagttyacgcgtggcatgcgwmgtgcagctgtntgccctgngntgg

SEQ ID NO: 261 - DNA, 538 bp, Homo sapiens
  misc_feature (462)..(462): n equals a,t,g, or c
  misc_feature (498)..(498): n equals a,t,g, or c
  misc_feature (520)..(520): n equals a,t,g, or c
gcttgtaggtactcattgaggtttattgtgtaagatgaatgaatgttgcaaattcctaaacatgtgattcagatgcccaatcttactctgttactttatgaaaattttttaaagctatatgatgttatatcaaaatatgttgttatactttaggataatcggtgtgttagccctgaatttcagcataagtcccatttttttccatgggagtctaggaaagctatatgtttattcagcagcaaaatacagtttggaacttaaataaactattgatcaattctggtcttatgctagaaggaataaagcatcaagaaaaagaaaagattgctgtcaagaccaggaaaattgacaatagagtattagaatgcagaaatgaggggaagtggaaargccascaagtaggagagaaaaagtgcagggacagtagaaagtgaatgtaggagcttctgacccagcactcangaacgcaattcatccctaaaaagctgttgcgtctangttgccagtaaccaattaaaanccgtttgaagtagagtga

SEQ ID NO: 262 - DNA, 1346 bp, Homo sapiens
  misc_feature (5)..(5): n equals a,t,g, or c
  misc_feature (17)..(17): n equals a,t,g, or c
  misc_feature (21)..(21): n equals a,t,g, or c
  misc_feature (36)..(36): n equals a,t,g, or c
  misc_feature (107)..(107): n equals a,t,g, or c
  misc_feature (150)..(150): n equals a,t,g, or c
  misc_feature (323)..(323): n equals a,t,g, or c
  misc_feature (1307)..(1307): n equals a,t,g, or c
  misc_feature (1337)..(1337): n equals a,t,g, or c
  misc_feature (1341)..(1341): n equals a,t,g, or c
  misc_feature (1343)..(1343): n equals a,t,g, or c
tcccntcaaggccgggnggcntgttcttggcctttncaacttttgcctttccactatttagaatgcaggtgtgtctgtcctgcaacccagcttctggctctggaaanccagctgcatcacccatgtgcctggaccttctccagaccatgnaggcccaggcgagtgactcactgccattcagtctccatctttgggcagatccaccatgagacataacttcccagaaatccagttacaaggaggaataagtattgaagacttaagaaatgcattttgcagcaggtcctcgctgtactggggcagcggtccattcatagagcccngctagaatagaggtcacaagctcagaagcttctctaaggcaggcaggaaatttaagtcgatactatgatctgcattgtgggctggaatgaacggaaggtgcctagtctaaacagctgcttgttgctcagctgttgttgccgtattgggaattcaagcctaatgatgtttggtattcccattttcaaaagaagtcaggaaatgcagatttctatgtaaatttttaaaacttctgaactgtgtatgagccatacaaaatacatttgcaggccagtcgacatcctctgatccagaatatcaatttgtgagacaagttgttggtgaggcagcattmcatagtagttaaaagcatacattttagagccagactgcccatgtccaaaccctggtcccatcactcactmccttycatttcacttctctttgcttcactttcctcatcagtaaaataaaaataatatcagtacctacctcatagggtttcatgagcattaaataaattaaaacccataaagtactttcaatgctatcaggcatttagttacatggtaaataagtgtttaaaacatttaaaacaaaagttcaaagataataarcaaggaaacagaaaacctgacaggccagctttggaaccttcttgatggcagatctatcaacatttctccctttggctgggatgaaaaggcatttgggaataaaagatcccataaaaataaatgagaagaagtgaaacaccttcattatggcaattttggtgtcagagcctaaaagacagagggatcaaaatattgcagtactaaaatctgatggtttcatgtagaaatgagatttaagcttattaaaatgtatttctttctggtgttaataacccttcacaagacctgggcaattttgaaagaaggaaagaaaatggttctccctgtggacaaraagaaacaaatgactattaaattttctaatttggagtgaactagggkgrttccccnagtttatgtgggaaggtttcagtgagggtngtangngaa

SEQ ID NO: 263 - DNA, 912 bp, Homo sapiens
  misc_feature (36)..(36): n equals a,t,g, or c
  misc_feature (93)..(93): n equals a,t,g, or c
  misc_feature (158)..(158): n equals a,t,g, or c
  misc_feature (592)..(592): n equals a,t,g, or c
aaaatggttctccctgtggcaagaagaaccaaatgnctattaaattttctaatttggagtgaactaagttgatccctaggtttttgtgggagnccggggtgggggagtccagtggaaagcaattgctggagagtagtccttgttctttgctgacagancaggagcagagtgtggaatgaaaactcaatagcctcctctattctcaagagacaattgacttccatctgtttaaacctccccaggggaccctgctccccccatttccatttactctcctttccaccaacctagggtgacattaagaaaaccaaacccatttgaaacacaagctcttacacatcaaaagtcaggggagaagtctggttgacctgtaagccactgcatgaggcacaaagatgcaaaaaggaactttcaggaacaactgctgctccgaggactctatgtcagatataacatccgctttggcccaaaagtaggcttgagccccagaagaggaggaatgtcmagtatgtttaaaatgtgaaacctttagttatacttgctctttactcagaaaggagagagtattcccttatgccaacgaggtctctgngagttgtttgcactattggtagcaggtgctgcctggggtagctcttatggtctgtgcttgaagtgtgcaccagctgctgccctggacatgactgttggtccctgcatacaagcagccacctttaaacagatcaaatgactcttatgatgacagctgtctcactrtactttcaaactggttttaatttggttacttgcaacctaagacagcaracagcattttagggatgaattgcgttcctgaagtgcatgggtcagaaagctcmtacattcactttytactgtccctgcactttttctatcctacttgctgcccttcca

SEQ ID NO: 264 - DNA, 1823 bp, Homo sapiens
ggcacgaggtcttgtgccaggcactgggatatggtgccgaattggatacaagggagatgggacgtcctcctgtgtgtcttgactgtcggtgtgttgccgagcattggtagcagagggggctggtttggcacccaggtaccctgcctcatccccggggccttggccagtctacacagaggaactgccctccagctgagttacccattttccatggcagggaggacagcagaaaggccgtgttccatgactaatcatagcttccatctattgagcatttactgggagctgggcactgtgctaagtgtgaaacgtgtgttgactcatttactacaacaacctggcaaggcagttcttccgttagcccctgctcaaagctaggggacctggagcacaggcggtcaagtgcttggctcaaggcacacagctcaaagtgcagatcctctgcccctcctggcatcccagtctgggggggtcaggggtgggatctctgcagtcagtgcctgggggctggatgacaagctgcagcctccccgcaaccccacgatttccatagcgcagtggagccagaaagaaacagaccattttacagaccagagaaacaaggttgctgctctctcagaccctggagccagtgacagggaaggcggagaagggacgagagcctccgtttattcggagcctgtgtataccctccttttcacaaactgtagcagcctccagaggcaggggggatctttatgatgaccaaatggggaggcttagggattggaaatcacttgcccgggagcgtgtggttggtaccactgggatttgagccttgttccgtccagctccagagcttggtgcctttcttgctcaccacgtgccggccccagctcgttgccttggcagtggaggtggtggtgtgccgaggccttcctgcaccctgggttctctggcgctgagaaataagtgcatgggcaaagtggctttgtttccaggtcagtgactgtgaccccatgtgtacacatctgtgcatctgaccgtggcattgtaacccaggggcattttctaagtgatgtgctgggggtgtgggcagggagtggggcttatggagccgacgagacaccatcagaccatagagaggctgcccaggcttgggagccatatggacctggatttgaccttgaacaggtcatttcacctgagtgtgtatagtgggaatgataacatccggctcacagaactgtggtgagaattagagatggtgggtgtcgaatgattagcacctaatcagcattttacaataaatgcaaattcttcccttctcgtagaagagtggagtctgatgagagagacagggaagtgaaaattcacagcccctggatgccagtgctgaaggagtgggttcaggactgggaacatcagaatgggcatagtgacttattctggggaagtcatgaaaagctccctggaggaggtgatgaaggggtacccaagcctggaagaggctggcagtggtactccagaaacttcatggtggcctgcaatttgtgatgcagatttttcctcactgtgagatgctggttgagacaatttcctccttggagtggcctggttttttaggggtagggggagtgcccacgtgggtgtagtttctagacagaagcagtgggaggagggcactgccaagcatgctgcttgggattatgggtgtccacagagctgcagtttctccaaaggtgttttttgtttgtttttgagacagggtcacactctgtcacccaggatggagtgcagtggcccgatcctagctcactgcaaccttgaactactaggctcga

SEQ ID NO: 265 - DNA, 1964 bp, Homo sapiens
  misc_feature (49)..(49): n equals a,t,g, or c
ttcctttagttcgggtgtagtggggatgtacgatacattcccagaacantagccatatcgcaagtgattacctcataaggacaaactgagtcacgcggtgcgccgtctagaactagtggatcccccgkctgyaggaattcggcacgagtcttgtgccaggcactgggatatggtgccgaattggatacaagggagatgggacgtcctcctgtgtgtcttgactgtcggtgtgttgccgagcattggtagcagagggggctggtttggcacccaggtaccctgcctcatccccggggccttggccagtctacacagaggaactgccctccagctgagttacccattttccatggcagggaggacagcagaaaggccgtgttccatgactaatcatagcttccatctattgagcatttactgggagctgggcactgtgctaagtgtgaaacgtgtgttgactcatttactacaacaacctggcaaggcaggttcttccgttagcccctgctcaaagctaggggacctggagcacaggcggtcaagtgcttggctcaaggcacacagctcagaagtgcagatcctctgcccctcctggcatcccagtctgggggggtcaggggtgggatctctgcagtcagtgcctgggggctggatgacaagctgcagcctccccgcaaccccacgatttccatagcgcagtggagccagaaagaaacagaccattttacagaccagagaaacaaggttgctgctctctcagaccctggagccagtgacagggaaggcggakaagggacgagagyctccgtttattcggagcctgtgtataccctccttttcacaaactgtagcagcctccagaggcaggggggatctttatgatgaccaaatggggaggcttagggattggaaatcacttgcccgggagcgtgtggttggtaccactgggatttgagccttgttccgtccagctccagagcttggtgcctttcttgctcaccacgtgccggccccagctcgttgccttggcagtggaggtggtggtgtgccgaggccttcctgcaccctgggttctctggcgctgagaaataagtgcatgggcaaagtggctttgtttccaggtcagtgactgtgaccccatgtgtacacatctgtgcatctgaccgtggcattgtaacccaggggcattttctaagtgatgtgctgggggtgtgggcagggagtggggcttatggagccgacgagacaccatcagaccatagagaggctgcccaggcttgggagccatatggacctggatttgaccttgaacaggtcatttcacctgagtgtgtatagtgggaatgataacatccggctcacagaactgtggtgagaattagagatggtgggtgtcgaatgattagcacctaatcagcattttacaataatgcaaattcttcccttctcgtagaagagtggagtctgatgagagagacagggaagtgaaaattcacagcccctggatgccagtgctgaaggagtgggttcaggactgggaacatcagaatgggcatagtgacttattctggggaagtcatgaaaagctccctggaggaggtgatgaaggggtacccaagcctggaagaggctggcagtggtactccagaaacttcatggtggcctgcaatttgtgatgcagatttttcctcactgtgagatgctggttgagacaatttcctccttggagtggcctggttttttaggggtagggggagtgcccacgtgggtgtagtttctagacagaagcagtgggaggagggcactgccaagcatgctgcttgggattatgggtgtccacagagctgcagtttctccaaaggtgttttttgtttgtttttgagacagggtcacactctgtcacccaggatggagtgcagtggcccgatcctagctcactgcaaccttgaactactaggctcgag

SEQ ID NO: 266 - DNA, 769 bp, Homo sapiens
  misc_feature (483)..(483): n equals a,t,g, or c
  misc_feature (667)..(667): n equals a,t,g, or c
  misc_feature (697)..(697): n equals a,t,g, or c
  misc_feature (708)..(708): n equals a,t,g, or c
  misc_feature (723)..(723): n equals a,t,g, or c
caccgcggtggcggccgctctagaactagtggatcccccgkctgyaggaattcggcacgaggtcttgtgccaggcactgggatatggtgccgaattggatacaagggagatgggacgtcctcctgtgtgtcttgactgtcggtgtgttgccgagcattggtagcagagggggctggtttggcacccaggtaccctgcctcatccccggggccttggccagtctacacagaggaactgccctccagctgagttacccattttccatggcagggaggacagcagaaaggccgtgttccatgactaatcatagcttccatctattgagcatttactgggarctgggcactgtgctaagtgkgaaacgtgtgttgactcatttactacaacaacctggcaaggcaggttcttccgttagcccctgctcaaagctaggggacctggagcacaggcggtcaagtgcttggctcaaggcacacagctcanaagtgcagatcctctgcccctcctggcatcccagtctgggggggtcaggggtgggatctctgcagtcagtgcctgggggctggatgacaaagctgcarccttcccgcamccccacgatttccatagcgcaatggagccagaaagaaacagaccattttacagaccagagaaacaagggtgctgntctcttaaaccctggagccagtgacagggnaaagccggaanaaaggaccaagaagnctccggttaattcggagcctggggaaacccttccttttacaaactg

SEQ ID NO: 267 - DNA, 818 bp, Homo sapiens
  misc_feature (68)..(69): n equals a,t,g, or c
  misc_feature (82)..(82): n equals a,t,g, or c
ctgtgcatctgacccgtggcattttaaccccaggggccatttttctaagtgatgtgctggggttgtgnncagggagtgggcnttatggacccgacgagacaccatcagacccatagagaggctgcccaggcttgggagccatatggacctggatttgaccttgaacaggtcatttcacctgagtgtgtatagtgggaatgataacatccggctcacagaactgtggtgagaattagagatggtgggtgtcgaatgattagcacctaatcagcattttacaataatgcaaattcttcccttctcgtagaagagtggagtctgatgagagagacagggaagtgaaaattcacagcccctggatgccagtgctgaaggagtgggttcaggactgggaacatcagaatgggcatagtgacttattctggggaagtcatgaaaagctccctggaggaggtgatgaaggggtacccaagcctggaagaggctggcagtggtactccagaaacttcatggtggcctgcaatttgtgatgcagatttttcctcactgtgagatgctggttgagacaatttcctccttggagtggcctggttttttaggggtagggggagtgcccacgtgggtgtagtttctagacagaagcagtgggaggagggcactgccaagcatgctgcttgggattatgggtgtccacagagctgcagtttctccaaaggtgttttttgtttgtttttgagacagggtcacactctgtcacccaggatggagtgcagtggcccgatcctagctcactgcaaccttgaactactaggctcgag

SEQ ID NO: 268 - DNA, 2052 bp, Homo sapiens
  misc_feature (2045)..(2045): n equals a,t,g, or c
tttgcttttcaaatgctcccaaggtctcagatgaagcggtgaaaaaagattcagagttggataagcacttggaatcacgggttgaagagattatggagaagtctggcgaggaaggaatgcctgatcttgcccatgtcatgcgcatcttgtctgcagaaaatatcccaaatttgcctcctgggggaggtcttgctggcaascgtaatgttattgaagctgtttatagtagactgaatccacatagagaaagtgatgggggtgctggagatctagaagacccatggtagccttaaaaaccttctaaaatgcttttrattctgaaaattgggggaaaaaacttttaatcacaattttcttcaatacaaggggaaaatattcttgcggattcccaacgttttgtgatatgagcagaaaatcattagcatttcccatcatttgttcatatttgtgttttctgacagttgccacttgtagcattgcctgtactacagtattttttgccaacctcaggcatactcgttacatctgtattgaactttcggccctagaaaccagtggagttatttcaccacaaatcaacaatgtgcctgaggtgcatgggaaatatagttagctatactctgaaaatacattatgttttttttctttaaacaaaacacacaacatgtaagcatgtaagagtaaagaattgtatgatatgttccttttttcagttcaccaagttggaagccttttgcagctctgtggcttggaatttcatttgagcaatttctataggatatgtatttattattgattgttatttaawttttttcccaattttacctgtattaccaaactgggttctccaataatgtccaaattgtaatgttgccttgcttcaagataaagtgtatttgggaataatattataaacccttacaaattttatgcatgtatctactgcatccttcaactctcactagaaaatcttttgaaaccaaatggattaatttatggctatttataatttgctttgacatctcactgttggaaattttttaaagatgagatttgcctttataatgtaaattgtgatttttgttttacatgtgggtttctatagttttaattttttcagcttttaagatacgagttttgtgtaatttggtatttttaatcatttatgttattttaaaagctcagaatatcacattgaaattactataaatacatttaaaattatctattttagatctaaggaaatactacagagatattttcatgggttcagtaacttttcattttataacattgggcacggtacagagtgattgtcacataaggtacttgaagatttattagtttaattctatttttacagtaaccttgaattcttctgagttttgcatgtattaaattcaattaatgctgaacatgaagagtaaagtatttatctgaaagaagtttctgggttaggagaagtaatgaatgtatccatttgtacatggtttacatgttgtggatgctttgtaaacattttcctgtatgtttaaattgtgtttcagcaggatgtaattgcccttgtgtgtagttaaaatgagtcatcatctggtcctttgtgaaatggaattcatggtattttctgtaacgttttcctgaagctgtttctggagagccacacatttaaatacagacagctttcctgatcatttgatttattgtgcacctgatttttggtctaaaaggaattattgccacaatatattttatttattctttagattttagccttgtaagttaaagtgctttacatgatgatgtgaaaagctgtttgtccctttactgggtttggggggttgttaaaagatagggaatgaagaatgcaaaatggtttatcgttcaaactgtccactctgatccaaccctgtactgatagtacttcccagtatgatattgtgatgtttcatacaatgcagtgaacataaccaacttgttacctaaataaagaattgataaaaacagtgtgacatattaaaaaaaaggggggcccggtacccaattcnccctata

SEQ ID NO: 269 - DNA, 891 bp, Homo sapiens
gaattcggcacgagccttgagctagcatttcattatgaccgtgattttyccccgcaccactttccagccttgtggtccacaattccactgggccttaagtatgtactgaactttcctgcctccctcattttgctctgcttgtgcaattttttccaccctccatctctgtcaaacgtaagccttcctgacctctaagacctacctttgtcatgtacctttaccctcaggcaaggagcaatctcttctcttcctcttctaccttgctgtagcttctccccaaggatttatcacattctgccttgaatcatagggaacagcatgtgtagtggaatgaacacaggcctctgaatccaagatacgagtttaaatcccagctttggaggtggttacttaaagtctcagtgccttcattcttctycctatataaagtagatattacaatatctaacttacagagtcattgggagctatacatgcagcgattgggtaaagcacctggcacatggcaagcgattagcaaatgctggttacttctacttctttctcttcccttttcccagtctatcataatttccttgararcaggcaccatgtcttatttacccttgtatttcccacagtacttcccatagtgarttacccttagtaaatacycagtaagttgaattgaatttaaattamctgtaagtcttaaaatgtgggattaaattaagaatatattgtcctggaaatacccaagtgtctattgatggatgaatggataaacaaaatgtggtatacacataatggaatattattcagccttaaaaaggaatgaaattctgacatgtgctacaatatgatgaacctggaagacattatatgtgaaataagccagacagaaaaggacaa

SEQ ID NO: 270 - DNA, 501 bp, Homo sapiens
aaagtacaggttgacatccaaaatctgaaatgagaaatgctccaaaaactgaaactttttcaatgccgacacgatgctcaaagaaaatgctaattggagcatttcagattttggatttttggatttgggatgctcaactggcataatgtgaatattccaaactctgaaaaaatctgaagtctaaaacacttctggtctcaaggattttggataaaggatactcaatgtgcaacatgtagaatggtggttgcaaggtgggaggagagaatggagagttactgtttaatgatacaatgtttccgtttgggaagatggaaagttttggagatgtgtgatggttatggttgcgcaacaatgggaaggtacttagtactgcttaactgtgcacacttaaaaatggtaaaaatgataaattttgtgtatgtcttaaaacaataaaagaagttttttaaaaaaaaaaaaaaaaaaaaaactcgagggggggcccgtacccaatcgcct

SEQ ID NO: 271 - DNA, 1681 bp, Homo sapiens
cgatggccccgcggccgctctagaaagtcccgttttttttttttttttttttttttttttttttagagtacgttctgcattttatttytgcaggcaacactttgctcaccagcaagaacacagcccraggaagggacccaataacctttcaaaacscaaactgctkcctgcggtgagggcccagggtcctccacggagaggacaggcatcttcctttcccaccaggaaggagtcagcccggagcctctgctatgtgcaaggcggtgtgcaagcaccggctgcggctctttgctgtctcttctttctctttggggctgggctgggtgtgcgttctggtgctgatgctttggcctgtgaggctgagcttggcayctcgacccgttcaattacagcaacgaagaagccactgctragygtggtctcaggggargcccggaggcagtgctcggcacccgggaacgtgctcaggcctcggtggggccaggcaggcagggcgggagctagcctgaaggcgcccgggttctgctgcagcgcatctcgcaccacgtcttcattctcctcctggcagagggagcacgtggagtagacgagccgctgcagggaagggaaagtgagcgcgtggcacagggctcgctgctggaaccctgccagggcatgcagacgcaccgggctaggtgtscctgccccgggmtcctccagctgtctgctcggcatacccgagccactgcaggaaggatccagcaggayrtagtggacctcaygrtagcgyggatcyragggggagaccgccaggaagtcctcctcagccagytcacagcargagacgccagcccrggccagcagcgtggccatggatgccagccgcttggcatccaggtcaaaggcaaagatcttcccttggttcttcagaagagcagccaagtgactggtcttattgcctggggcggcacaggcatcgatgacatgggagcctggcggggggtccagcagcatggctgggagacagctggccctgtcctgcagaatgaggtgtccggcccggtacagtgggtgttcatgcagatctgtctgggcgggaaacaccagcagctccggcatcaaggggtccaggagaaaatgcttccccttgagggctcgtaagtcatcgaggctggaagcccgaccctgataggagaaaccttgtctcttgaaataatcaactacatcatcggagcaggtcttgagagtgttcacacgcacaaatcgaggcagctgggaggctggaccaggcctggatcccacttccaacaggtcctcattccggctcacaccccgatgaaccttgagccgagccaactcagccttgagcctcgcctggtgccggcccaacagagccttccatcggcccccaccccctcgaaagccctttcccaacaacaactcatacactagcaccttggccaggtgcggccgcagcttcttctccgcacggaggaggccggcgctggcgatcacagcatccagcacggcggagtagcgctgcgtttcgcacaccagcgcgtacagctgcttcacgttctggaagttgctggagtacaccaaccccttgatagagcctggcggctctccacgccggccaacacgcctgcagctgcagcatacagccccatgttccgtcgcgctttacggctttgtggcaaaa

SEQ ID NO: 272 - DNA, 1540 bp, Homo sapiens
ggcacgagggaactagtatattcaccgtctatgaggccgcctcacaggaaggctgggtgttcctcatgtacagagcaattgacagctttccccgttggcgttcctacttctatttcatcactctcattttcttcctcgcctggcttgtgaagaacgtgtttattgctgttatcattgaaacatttgcagaaatcagagtacagtttcaacaaatgtggggatcgagaagcagcactacctcaacagccaccacccagatgtttcatgaagatgctgctggaggttggcagctggtagctgtgggatgtcaacaagccccagggacgcgccccagcctgcctccaggtgcagtacaatgacatttttaaaaatcgcccagcaaaggtctttgaattttatttcatccaagaaaatccacagctctttaagctctagatttgtccaaatttaaaatcctgaagttagagatggtatttcactccttcctctattcccaggacctagctttttttttttaacatacacaatagggatttgataagtttctgatggctgcaggcatgtaagagcatttcagtggtattgaatcaatgaagaattttgttgacatgtgaaatcttataaaaatattctttaccgaaggactgagttatgtggcagtgggcaaattcattgtttcatacctcccctagtaactgggaaaaatatgttaatacatagtctctctgtttttctgcatttggaagctttcagaggaacataatgtagaggtgtttctttagcaaagtgcactgatagcaaacataaggattgcaggtggggcctgagagtcctcatgagatagattctcacagtgattagaagatggagtctcacgtccctgcctgtgaactttctggaaaaaccatcttctccaagctgccattgacaacaatatggataacaataataacaataaggcccaataaactcctttatctcttcttcagggggccatactgacatcttctcttccttggtttcccctccttgccccctaaatatccagtaactcattcaaaataatgtcaccttaccaagagcagcacccctaactttccataatattttcactttcattttccctccaagcagcccactcgtaggaccgtagaattgattcttccacctggagaattttattttctttagcctttttggttttcagtgacaaatcctcttctcgcaaggggtggtttccatagttgtttatatcctgccctcataatttggagaagtgttcacatctgccgtgggatgagactgtatctcttttctttcttttgggtctttctccagatagggacttcttatgcaactcaaggatgggtacatgaaaaataaaattgtactctgagccattactggtgggctatgtttatatggccattttaccatagagttatttacttctttttgtttctatttgtattgaggtgtgattaacaaataaaattgtaaatacttaaggtaaaaaaaaaaaaaaaaaaaaaaaaaaaaa

SEQ ID NO: 273 - DNA, 819 bp, Homo sapiens
gaattcggcacgaggagaatcatgggcctctggctgggcatgctggcctgtgtcttcctggcaactgctgcctttgttgcttatactgcccggctggactggaagcttgctgcagaggaggctaagaaacattcaggccggcagcagcagcagagagcagagagcactgcaaccagacctgggcctgagaaagcagtcctatcttcagtggctacaggcagttcccctggcattaccttgacaacgtattcaaggtctgagtgccacgtggacttcttcaggactccagaggaggcccacgccctttcagctcctaccagcagactatcagtgaaacagctggtcatccgccgtggggctgctctgggggcggcgtcagcacactgatggtggggctcacggtcaggatcctagccaccaggcactagcaaagaagcttggaaatagaaagccaggagtggctgtccccagtatgcaaacacaccacggtctgccctgcaaaaacaccaatggggtctagtgcaggtggacactttgaaccactcctcaaaaaaagaactttggctgatyccttgtggtgacactcagaggggtctgaacagacttgacaattctgttctggtcaagctggagttttcttctgtgacttggactgctctacagaagacatcagccaactgcacgagtcagagtccagggattgtcactattattaataatgtaaatggcttcaaatgggacactgcagataammycacaaaaaccactgttatattaaagattacacatttcctggaaaaaaaaaaaaaaaaaactcga

SEQ ID NO: 274 - DNA, 2460 bp, Homo sapiens
  misc_feature (172)..(172): n equals a,t,g, or c
  misc_feature (2457)..(2457): n equals a,t,g, or c
  misc_feature (2459)..(2460): n equals a,t,g, or c
ggatcgccgggaggacccccgcctcgccgaagacgggcggggcaagccgagcctcacggggtccccggagctgggccgggcctccagatggagaaggcgcaacggggagttcttgagtaagccagagcggtgtccagcgcggtgtagccgcagccgccgctgtcaggcgcancaacgggcaaccccgtagaagtcggtcggcaggtcctctccaacccgccgctaccgcgccgctgtgggagagaccccagcaggagcccaarggcagctacgggggcgcgaaggccgctggcgccgcctcggccagcccttcccgcgcggttccactgccttaaggatgacagtcgtagggaaccctcgaagttggagctgccagtggttgccaatcctgatactgttgctgggcacaggccatgggccaggggtggaaggcgtgacacactacaaggccggcgaccctgttattctgtatgtcaacaaagtgggaccctaccataaccctcaggaaacttaccactactatcagcttccagtctgctgccctgagaagatacgtcacaaaagccttagcctgggtgaagtgctggatggggaccgaatggctgagtctttgtatgagatccgctttcgggaaaacgtggagaagagaattctgtgccacatgcagctcagttctgcacaggtggagcagctgcgccaggccattgaagaactgtactactttgaatttgtggtagatgacttgccaatccggggctttgtgggctacatggaggagagtggtttcctgccacacagccacaagataggactctggacccatttggacttccacctagaattccatggagaccgaattatatttgccaatgtttcagtgcgggacgtcaagccccacagcttggatgggttacgacctgacgagttcctaggccttacccacacttatagcgtgcgctggtctgagacttcagtggagcgtcggagtgacaggcgccgtggtgacgatggtggtttctttcctcgaacactggaaatccattggttgtccatcatcaactccatggtgcttgtgtttttactggtgggttttgtggctgtcattctaatgcgtgtgcttcggaatgacctggctcggtacaacttagatgaggagaccacctctgcaggttctggtgatgactttgaccagggtgacaatggctggaaaattatccatacagatgtcttccgcttccccccataccgtggtctgctctgtgctgtgcttggcgtgggtgcccagttcctggcccttggcactggcattattgtcatggcactgctgggcatgttcaatgtgcaccgtcatggggccattaactcagcagccatcttgttgtatgccctgacctgctgcatctctggctacgtgtccagccacttctaccggcagattggaggcgagcgttgggtgtggaacatcattctcaccaccagtctcttctctgtgcctttcttcctgacgtggagtgtggtgaactcagtgcattgggccaatggttcgacacaggctctgccagccacaaccatcctgctgcttctgacggtttggctgctggtgggctttcccctcactgtcattggaggcatctttgggaagaacaacgccagcccctttgatgcaccctgtcgcaccaagaacatcgcccgggagattccaccccagccctggtacaagtctactgtcatccacatgactgttggaggcttcctgcctttcagtgccatctctgtggagctgtactacatctttgccacagtatggggtcgggagcagtacactttgtacggcatcctcttctttgtcttcgccatcctgctgagtgtgggggcttgcatctccattgcactcacctacttccagttgtctggggaggattaccgctggtggtggcgatctgtgctgagtgttggctccaccggcctcttcatcttcctctactcagttttctattatgcccggcgctccaacatgtctggggcagtacagacagtagagttcttcggctactccttactcactggttatgtcttcttcctcatgctgggcaccatctcctttttttcttccctaaagttcatccggtatatctatgttaacctcaagatggactgagttctgtatggcagaactattgctgttctctccctttcttcatgccctgttgaactctcctaccagcttctcttctgattgactgaattgtgtgatggcattgttgccttcccttttgccctttgggcattccttccccagagagggcctggaaattataaatctctatcacataaggattatatatttgaactttttaagttgcctttagttttggtcctgatttttctttttacaattaccaaaataaaatttattaagaaaaagaaaaaaaaaaaaaaaaaaaaaaaggggggggngnn

SEQ ID NO: 275 - DNA, 1163 bp, Homo sapiens
ggcacgagctggctgcagggtctctggggagagaaggggcctcggcttcacaggatggggctgccagtgtcctgggcccctcctgccctctgggttctagggtgctgcgccctgctcctctcgctgtgggcgctgtgcacagcctgccgcaggcccgaggacgctgtagcccccaggaagagggcgcggaggcagcgggcgaggctgcagggcagtgcgacggcggcggaagcgtccctactgaggcggacccacctctgctccctcagcaagtcggacaccagactgcacgagctgcaccggggcccgcgcagcagcagggccctgcggcctgccagcatggatctcctgcgcccacactggctggaggtgtccagggacatcaccggaccgcaggcagccccctctgccttcccacaccaggagctgccccgggctctgccggcagctgcagccaccgcagggtgcgctggcctcgaggccacctattccaacgtggggctggcggcccttcccggggtcagcctggcggccagccctgtggtggccgagtatgcccgcgtccagaagcgcaaagggacccatcgcagtccccaagagccacagcaggggaagactgaggtgaccccggccgctcaggtggacgtcctgtactccagggtctgcaagcctaaaaggagggacccaggacccaccacagacccgctggaccccaagggccagggagcgattctggccctggcgggtgacctggcctaccagaccctcccgctcagggccctggatgtggacagcggccccctggaaaacgtgtatgagagcatccgggagctgggggaccctgctggcaggagcagcacgtgcggggctgggacgccccctgcttccagctgccccagcctagggaggggctggagacccctccctgcctccctgccctgaacactcaaggacctgtgctccttcctccagagtgaggcccgtcccccgccccgccccgcctcacagctgacagcgccagtcccaggtccccgggccgccagcccgtgaggtccgtgaggtcctggccgctctgacagccgcggcctccccgggctccagagaaggcccgcgtctaaataaagcgccagcgcaggatgaaagcgaaaaaaaaaaaaaaaaaa

SEQ ID NO: 276 - DNA, 1183 bp, Homo sapiens
tgcaggaattcggcacgagctggctgcagggtctctggggagagaaggggcctcggcttcacaggatggggctgccagtgtcctgggcccctcctgccctctgggttctagggtgctgcgccctgctcctctcgctgtgggcgctgtgcacagcctgccgcagcccgaggacgctgtagcccccaggaagagggcgcggaggcagcgggcgaggctgcagggcagtgcgacggcggcggaagcgtccctactgaggcggacccacctctgcttccctcagcaagtcggacaccagactgcacgagctgcaccggggcccgcgcagcagcagggccctgcggcctgccagyatggatctcctgcgcccacactggctggaggtgtccagggacatcaccggaccgcaggcagccccctctgccttcccacaccaggagctgccccgggctctgccggcagctgcagccaccgcaggtgcgctggcctcgaggccacctattccaacgtggggctggcggcccttcccggggtcagcctggcggccagccctgtggtggccgagtatgcccgcgtccagaagcgcaaagggacccatcgcagtccccaagagccacagcaggggaagactgaggtgaccccggccgctcaggtggacgtcctgtactccagggtctgcaagcctaaaaggagggacccaggacccaccacagacccgctggaccccaagggccagggagcgattctggccctggcgggtgacctggcctaccagaccctcccgctcagggccctggatgtggacagcggccccctggaaaacgtgtatgagagcatccgggagctgggggaccctgctggcaggagcagcacgtgcggggctgggacgccccctgcttccagctgccccagcctagggaggggctggagacccctccctgcctccctgccctgaacactcaaggacctgtgctccttcctccagagtgaggcccgtcccccgccccgccccgcctcacagctgacagcgccagtcccaggtccccgggccgccagcccgtgaggtccgtgaggtcctggccgctctgacagccgcggcctccccgggctccagagaaggcccgcgtctaaataaagcgccagcgcaggatgaaagcgaaaaaaaaaaaaaaaaaagggcggccgc

SEQ ID NO: 277 - DNA, 768 bp, Homo sapiens
  misc_feature (581)..(581): n equals a,t,g, or c
  misc_feature (675)..(675): n equals a,t,g, or c
  misc_feature (721)..(721): n equals a,t,g, or c
  misc_feature (723)..(723): n equals a,t,g, or c
  misc_feature (742)..(742): n equals a,t,g, or c
ggtactgtgttggcttgttttgcagtgagacttattctgagattaagagctgcatttagcttcttggccaccaggatcccagagtaaattacttttcaggactctacatagtacgcaggagatttgaaagaactgatgcaatttctaaagcagcctgacttcctcccaggaggttactcccacaccaagcctctgacttcatgaccaccagatttagaaattgaagtatctatgtaagaagttgcctcctaggcagaaatcaagaaatccaactataacataggttagagtccattttggtttttatatccttccacagaggaaagaggaggaagaatctggagatgcgtttttggtttttggtttttkgtttttttttttttccagaggctcatgtatatcctacatcatggkcagtttcagagcagggctgkgccaccatctcagtgactcctggaatactaaattggatctttgtagaggaagaaaataacacagttctagattttccctagctgttaattagttttatggcataattaaaatagctcaggagtaaaaacaaagtccagccttaacancctgttaagtcttcttttcttatctgaaaagaggtaagataatgaagtttaaacagttgaagaagttaaccgggaaaggaattaacatttcaanggccttgccgctttcttcctcctcttgtgatatgaaccagaattgnangggaaaatagggcagggangggaaccccacactggaaattttcca

SEQ ID NO: 278 - DNA, 2087 bp, Homo sapiens
  misc_feature (17)..(17): n equals a,t,g, or c
  misc_feature (25)..(25): n equals a,t,g, or c
  misc_feature (73)..(73): n equals a,t,g, or c
  misc_feature (94)..(94): n equals a,t,g, or c
  misc_feature (1552)..(1552): n equals a,t,g, or c
cttcatctccctttcgnttaaggcncctcccttttttttttttccagaggctcatgtatatcctacattttgnttagtttcagagcagggctgngccaccatctcagtgactcctggaatactaaattggatctttgtagaggaagaaaataacacagttctagattttccctagctgttaattagttttatggcataattaaaatagctcaggagtaaaaacaaagtccagccttaacagcctgttaagtcttcttttcttatcttgaaaagaggtaagataatgaagtttaaacagttgaagaagttaaccggaaaggaattaacatttcaaggccttgccgcttcttcytcctcttgygatatgaaccagaattgagggaaaataggcaggagggaacccacactgaattttccagactctactgctgaaagacattgtatatttttattgtaatcatatgtgatgcaagataatattgctcatatctgaatcccaaaagaaaagaagatgtttgyctgagcatcccatgaggtaagcagccccatggaaggaccagctgcatccagcaaagggctccaggtccctgacgtagttgacggtgatggcagaagtaaatctttgtattcttgcagagactttgtttctgaaagaggccaaaagtcatttcaaactgaatctgacggataagataggggccatagctgagaaaaataagtagcgaagccgatctaaaccaaggtgtaactgtgaaatagtaaccatcttctttgcacgtttcaaaattggccctggacgccatcgcaagaggaaaattccaaagctgtgcagcagcggcagtaccattggaagagtttacagcctaccaggactacttagaaggggatcatgtttatttggatatataacccctgattggtttgttttaaaaataaacgttattatgttagtgtcatacctcatggtttccttggaacattctcctctaatcctctttgagagagtgggagggagagattgtgaggggagagagaagtgttaaacagagatgttcctaaggaggaccaggaatcctaaattacctaaataacccacttggttatctccactccttgatagcactgtgtgaggtatgatgcagtcaggtaaaggacaatttatctttgaagacaaagataaattcgagtccccattttcaagagtcagtgagaagtamcagcttgtttgtgtggcactgattgatccttgtccgggcaagtggtccctccacaggttatccggcttggcacacaacagacagaggtgctggcggactgtggaaccagacccgctgtggttcccctcctcaccctgccacttcctagctgtgcatcttggacaactgattgaatcttgtgcctcatttttctgtggaattgaaacaataccctgacccattgggcaatggagatcaaatggcattgatgcaggtaacatgcttaacacagggcctggtatgtagtgggcattcagtaagtggaagttacgattattattaggtatcaaagarcnaaacttaattgtcagawtaagcaaaccagttggaataataaacgtagcctttagagttaaatggcacaaccctgatagccacacataaactgttttggttatttttcgttggatattcccagtctttatttctacatccctcttcaggctgagtgcttaaaatacatttatatgtagtctcaattagattatgctgtttcccccaaaagactacagtgactattattttaatttatagaacctcgaattgcatggaatagctaccacatctccctttaaacctggtagcttccaaaacttcctgatggcgttttcgcaaatgggtccctatgtgtcattgaaggagacagtgtatctaggaaaagaaatgaggatactgagcaaggtgttggtggctcatgcctataattccagcattttgggagactaaggcaggtagctagcttgaggccaggagttcaagaccagcctggccaacacaatgagaccccatctccacaaaaaaaaaaaaaaaaaaaaaaaaaagggcggccgc

SEQ ID NO: 279 - DNA, 2096 bp, Homo sapiens
  misc_feature (2070)..(2070): n equals a,t,g, or c
  misc_feature (2083)..(2083): n equals a,t,g, or c
  misc_feature (2090)..(2090): n equals a,t,g, or c
ggaggaacggtggaagtcgccggaagttcggtgggctccaggcgtcgcgatggaggagagcgggtacgagtcggtgctctgtgtcaagcctgacgtccacgtctaccgcatccctccgcgggctaccaaccgtggctacagggctgcggagtggcagctggaccagccatcatggagtggccggctgaggatcactgcaaagggacagatggcctacatcaagctggaggacaggacgtcaggggagctctttgctcaggccccggtggatcagtttcctggcacagctgtggagagtgtgacggattccagcaggtacttcgtgatccgcatcgaagatggaaatgggcgacgggcgtttattggaattggcttcggggaccgaggtgatgcctttgacttcaatgttgcattgcaggaccatttcaagtgggtgaaacagcagtgtgaatttgcaaaacaagcccagaacccagaccaaggccctaaactggacctgggcttcaaggagggccagaccatcaagctcaacatcgcaaacatgaagaagaaggaaggagcagctgggaatccccgagtccggcctgccagcacaggagggctgagcctgcttccccctcccccaggggggaaaacctccaccctgatccctccccctggggagcagttggctgtggggggatccctcgtccagccagcagttgctcccagttcaggaggtgctcctgtaccctggccacagcccaatcctgccactgctgacatctggggagactttaccaaatctacaggatcaacttccagccagacccagccaggcacaggctgggtccagttctgacctgagcacggtttttcctcatgtgacttctgggaaggcgctccctcatctgggccaaaggaaggaggacgaagccctcctcagctggcctgtgtttggggcatgaatctctcctctcctccttgtctggctctgttgacaaaccgggcatgtttggcagtaaattggcaccgtgtcacactgtttcctgggattcaagtatgcaaccagaacacaggagaagaaaagctccaggatccctgtccccatctgtcctcttgatgtgagagagactctgagacttcttccatcgcaatgacctgtattaaacacaagccccccaagcaaaagaagaggttgagtttgctgccaggattcagatcagcccttcccagggtctgcaggtgtcacatgatcacagttcagcgggaggctttccgtacccacactggctgtagccacttcagtccatctgccctccagaggaggggtttcttcctgatttttagcaggtttagaggctgcagcttgagctacaatcaggagggaaattggaaggattagcagcttttaaaaatgtttaaatattttgctttgctaatgtgctgatccgcactaactcatctttgcaaaaggaactgctccctcggcgtgccccagctggggcctctgaagggattcctcactgtgggcagctgccctgagcttcaggcagcagtgttcatctctggccagttgtctggtttccatgtattctaggccaggtaggcaacacagagccaaggcgggtgctggaagccagacggaacagtgttggggcaggaaggtggatgctgttgtcatggagctgtgggagttggcactctgtctgctggtggccctctcggctcacatgttcacagtgcagctcctggcagacttgggttttctctttggtggtttctaaagtgccttatctgcaaacaacttcttttctccttcaggaactgtgaatggctagaagaaggagctcagtaaactagaagtccagggttgcttggtttactggtttataagaaatctgaaagcacctctgacattccttttattaactcacctctcagttgaaagatttcttctttgaaaggtcaagaccgtgaactgaaaaaagtgttggcctttttgcgggaccagatttttaagataaaataaatatttttacttctgtcattgtatgtgaaaagatgaatgtgtttctggcgcgtggctgntaaaactcttcanggtgccncaagct

SEQ ID NO: 280 - DNA, 1239 bp, Homo sapiens
cccacgcgtccgcccacgcgtccgcccacgcgtccggctgcggcgcgatggcggcggggctggcgcggctcctgttgctcctcgggctctcggccggcgggcccgcgccggcaggtgcagcgaagatgaaggtggtggaggagcccaacgcgtttggggtgaacaacccgttcttgcctcaggccagtcgcctccaggccaagagggatccttcacccgtgtctggacccgtgcatctcttccgactctcgggcaagtgcttcagcctggtggagtccacgtacaagtatgagttctgcccgttccacaacgtgacccagcacgagcagaccttccgctggaacgcctacagtgggatcctcggcatctggcacgagtgggagatcgccaacaacaccttcacgggcatgtggatgagggacggtgacgcctgccgttcccggagccggcagagcaaggtggagctggcgtgtggaaaaagcaaccggctggcccatgtgtccgagccgagcacctgcgtctacgcgctgacgttcgagacccccctcgtctgccacccccacgccttgctagtgtacccaaccctgccagaggccctgcagcggcagtgggaccaggtagagcaggacctggccgatgagctgatcaccccccagggccatgagaagttgctgaggacactttttgaggatgctggctacttaaagaccccagaagaaaatgaacccacccagctggagggaggtcctgacagcttggggtttgagaccctggaaaactgcaggaaggctcataaagaactctcaaaggagatcaaaaggctgaaaggtttgctcacccagcacggcatcccctacacgaggcccacagaaacttccaacttggagcacttgggccacgagacgcccagagccaagtctccagagcagctgcggggtgacccaggactgcgtgggagtttgtgaccttgtggtgggagagcagaggtggacgcggccgagagccctacagagaagctggctggtaggacccgcagggaccagctgaccaggcttgtgctcagagaagcagacaaaacaaagattcsaggttttaattaattcccatactgataaaaataactccatgaattctgtaaaccattgcataaatgctatagtgtaaaaaaatttaaacaagtgttaactttaaacagttcgctacaagtaaatgattataaatactaaaaaaaaaaaaaaa

SEQ ID NO: 281 - DNA, 1333 bp, Homo sapiens
  misc_feature (485)..(486): n equals a,t,g, or c
  misc_feature (493)..(493): n equals a,t,g, or c
  misc_feature (496)..(496): n equals a,t,g, or c
  misc_feature (587)..(587): n equals a,t,g, or c
  misc_feature (633)..(633): n equals a,t,g, or c
  misc_feature (1330)..(1330): n equals a,t,g, or c
agctggtaccaaagcaagtttttcactgagctctcatgaaagatcctcagtctcttgtggatttagaatcctgcagcagcccaccatctaagagcaagarccaaagatgtttgtcttgctctatgttacaagttttgccatttgtgccagtggacaaccccggggtaatcagttgaaaggagagaactactcccccaggtatatctgcagcattcctggcttgcctggacctccagggccccctggagcaaatggttcccctgggccccatggtcgcatcggccttccaggaagagatggtagagacggcaggaaaggagagaaaggtgaaaagggaactgcaggtttgagaggtaagactggaccgctaggtcttgccggtgagaaaggggaccaaggagagactgggaagaaaggacccataggaccagagggagagaaaggagaagtaggtccaattggtcctcctggaccaaagggagacnnatgatanctntgggacccggggctgcctggagtttgcagatgtggaagcatcgtgctcaaatccgccttttctgttggcatcacaaccagctacccagaanaaagactacctattatatttaacaaggtcctccttccacgaggganagcactacaaccctgccacaggggaagttcatctgtgctttcccaggggatctattacttttcttatgatatcacattggctaataagcatctggcaatcggactggtacacaatgggcaataccggataaagaccttcgacgccaacacaggaaaccatgatgtggcttcggggtccacagtcatctatctgcagccagaagatgaagtctggctggagattttcttcacagaccagaatggcctcttctcagacccaggttgggcagacagcttattctccgggtttctcttatacgttgacacagattacctagattccatatcagaagatgatgaattgtgatcaggaccaagatccctgtggtaaacactctgattgaatctggggttccagaaggtggaacaagcaggaatgggatccaaagagactcccactcagattctaaagcatttaaagacaattctagcagaatttatcaaaacaagatgaaacacagaaaagttgaaaccacaacaaaatgaattctattaaagaatagccccagatataaattctcttgaaagcaatgttcataaatatttaagcaaattaaagacaatgttaacaaattttctattaaatgccctgagtgataaaaccagttggcaataatattgccttattaaatcttcaaaaaataaaaaaaattaaaanaaa

SEQ ID NO: 282 - DNA, 1140 bp, Homo sapiens
ctaggagcctcctaatgcagtgttctgcacagtcctggggactgactgactgaatcacacctctggggctgggggctgctgacatgtgtgcctttccttggctgcttcttctcctgctgctccaggarggcagccaaaggagactctggagatggtgtggatccgaggaagtggttgcggtccttcaggagtccatcagcctccccctggaaataccaccagatgaagaggttgagaacatcatctggtcctctcacaaaagtcttgccactgtggtgccagggaaagagggacatccagctaccatcatggtgaccaatccacactaccagggccaagtgagcttcctggaccccarctattccctgcatatcagcaatctgagctgggaggattcagggctttaccaagctcaagtcaacctgagaacatcccagatctctaccatgcagcagtacaatctatgtgtctaccgatggctgtcagagdccccasatcactgtgaactttgagagttctggggaaggtgcctgcagtatgtccctggtgtgctctgtggagraaggcaggcatggatatgacctacagctggctctcccggggggatagcacttatacattccatgaaggccctgtcctcagcacatcctggaggccgggggacagtgccctctcctacacctgcagagccaacaaccccatcagcaacgtcagttcttgccccatccctgatgggcccttctatgcagatcctaactatgcttctgagaagccttcaacagccttctgcctcctggccaagggattgctcatcttcttgctcttggtaattctggccatgggactctgggtcatccgagtccagaaaagacacaaaatgccaaggatgaagaaactcatgagaaacagaatgaaattgaggaaggaggcaaagcctggctccagccctgcctgactgctccttgggaaccccagtcctgagcttggtttcttcccagcacccagagaatccttcctcagctctcttctttccaggggaaggaggtgctcaggggtgggtatccagagagccatacttctgagggaagactggctggcaataaagtcaaattaagtgaccaccaaaaaaaaaaaaaaaaa

SEQ ID NO: 283 - DNA, 1038 bp, Homo sapiens
ggcacgaggcgcctcggacggccgtcggggccgagaaaccatgagccccaggggcacgggctgctccgccgggctgctgatgactgtcggctggctgcttctggcgggcctccagtccgcgcgcgggaccaacgtcaccgctgccgtccaggatgccggcctggcccacgaaggcgagggcgaggaggagaccgaaaacaacgacagcgagaccgcggagaactacgctccgtctgaaaccgaggatgtttcaaataggaatstcgtcaaagaagtagaattcggaatgtgcaccgttacatgtggtattggtgttagagaagttatattaacaaatggatgccctggtggtgaatccaagtgtgttgtacgggtagaagaatgcccgtggaccaacagattgtggctggggtaaaccaatttcagaaagtcttgaaagtgttagattggcatgtattcacacatctcccttaaatcgtttcaaatatatgtggaacttctaagacaagaccacaatccattatacttgtaaatgattcagcaatcctagaagtacgcaaggaaagtcaccccttggctttcgagtgtgacacactggataataatgaaatartagcaactattaaattcacagtctatacgagcagtgaattgcagatgagaagatcaagcctaccagccactgatgccagccctaatttttgtgctgaccataggagtcattatctgtgtatttataattttcttattgatcttcataatcataaattgggcagcagtcaaggctttctggggggcaaaagcctctacacctgaggtacaatccgagcagagttctgtgagatacaaagattcaacttctcttgaccaattaccaacagaaatgcctggtgaagatgatgctttaagtgaatggaatgaatgatgtttgaatgatatataacaaaccaaaggatattacagaatattagattcattattacaaaaataaaatacacattgaaatactttaaaaaaaaaaaaaaaaaaaaaactcga

SEQ ID NO: 284 - DNA, 745 bp, Homo sapiens
  misc_feature (312)..(312): n equals a,t,g, or c
gtacaggactgagaagcagataacaagagtgacgctcacagggctgggctgacgctaacaggaggcagtgtgtggctcgaagattcttgaacccacagcagcagctgcggccaccccatcctgcccacagctccagccctgagacgacgaggaggagagtcgactttgcctcttgcccaagggaccatgcccaggtgccggtggctctccctgatcctcctcaccattcccctggccctggtggccaggaaagacccaaaaaagaatgagacgggggtgctgaggaaattaaaacccgtcaatgccttcaantgccaacgtggaagcagtgtyygtggttttgccatgcaagaatacaacaaagagagcgaggacaagtatgtcttcctggtggtcaagacactgcaagcccagcttcaggtcacaaatcttctggaataccttattgatgtagaaattgcccgcagcgattgcagaaagcctttaagcactaatgaaatcgcgccattcaagaraactccaagctgaaaaggaaattaagctgcagctttttggtaggagcacttccctggaatggtgaattcactgtgatggagaaaaagtgtgaagatgcttaatggtgttttgaggcatccctccaacctctgtgactactttatccatgaaaatgaagcaatggtcaggtgggaggctcttcccaatgtgctttcttcaaaaaaaaaaaaaaaaaaaaaaaaaaactcga

SEQ ID NO: 285 - DNA, 632 bp, Homo sapiens
  misc_feature (537)..(537): n equals a,t,g, or c
  misc_feature (579)..(579): n equals a,t,g, or c
tttgagcactactgggtggttagcatgattgaggaaaaatgatgggaataagaagtggaagtggtctttgtatcacaagttgaatttctcactttgagtagtagtgaagtcactactgtaagagctggtcagtgaatgtggttgcagcatggcctttgggcaagaagtaacccatttaactaaaaccagctggttggccccactcagatttatcaaagggttactgggtccctgggggtggatattgcttatattagacttagaatagcatactgttttaatattatatgaactaaaatgtttctttaaaaaaagagtggtctgttaatggatttatgtagtggtcaagaatttagacttcagagtcaaataaacctatatcagtcctagtcctacagtttactaattgtgagatgkcaagcaagkttttgaactcctctaagcctctgktttcttatctataaattaataaatgaatgaatcgggttgagtgaataattaagtaaaatcttaagacatactagttattggaactgngaaactgggttttttgggaatgggtttcacatttgggaagtngaaataccactttctaaaggtctggtttatctcaaatctctatccaggcctaa

SEQ ID NO: 286 - DNA, 408 bp, Homo sapiens
  misc_feature (350)..(350): n equals a,t,g, or c
  misc_feature (376)..(376): n equals a,t,g, or c
  misc_feature (386)..(386): n equals a,t,g, or c
  misc_feature (404)..(404): n equals a,t,g, or c
gatctacctggaatgaacaagaatgaacgccagcctcatttcatgggttttggttctccacaggatctgcctcggtctgtcagacattcctaaggaaaattgtataataactatttcgggaatgcagttatctcatcatggtcagtctttggggaagtgggctgagaaattacatgtgttctattctctattttcattcctattgtgaccttcacaccgactcaaaaccttccttttagatacttctggatataaaaatatatgttaattttggggtttcacactcctgagtgaaaggcagtgtcatcaagtacgtgaatgcccagctcctaaatgtctttctcgttctnctcccacccagtcacgtcctccaagnagtgaacttnctttaattcacaatccgnttac

SEQ ID NO: 287 - DNA, 1299 bp, Homo sapiens
  misc_feature (1291)..(1291): n equals a,t,g, or c
atccaaagaattcggcacgagcgaagatggcggcggcgacaggaggcgctgagggagttcgtggcggtgacgggcgccgaggaggaccgggcccgcttctttctcgagtcggccggctgggacttgcagtgataatagagtgacatccttcaragacctcattcatgaccaagatgaagatgaggaggaagaggaaggccagaggttttatgctgggggctcagagagaagtggacagcagattgttggccctcccaggaagaaaagtcccaacgagctggtggatgatctctttaaaggtgccaaagagcatggagctgtagctgtggagcgagtgaccaagagccctggagagaccagtaaaccgagaccatttgcaggaggtggctaccgccttggggcagcaccagaggaagagtctgcctatgtggcaggagaaaagaggcagcattccagccaagatgttcatgtagtattgaaactctggaagagtggattcagcctggataatggagaactcagaagctaccaagacccatccaatgcccagtttctggagtctatccgcagaggggaggtgccagcagagcttcggaggctagctcacggtggacaggtgaacttggatatggaggaccatcgggacgaggactttgtgaagcccaaaggagccttcaaagccttcactggcgagggtcagaaactgggcagcactgccccccaggtgttgagtaccagctctccagcccaacaggcagaaaatgaagccaaagccagctcttccatcttaatcgacgaatcagagcctaccacaaacatccaaattcggcttgcagacggcgggaggctggtgcagaaatttaaccacagccacaggatcagcgacatccgactcttcatcgtggatgcccggccagccatggctgccaccagctttatcctcatgactactttcccgaacaaagagctggctgatgagagccagaccctgaaggaagccaacctgctcaatgctgtcatcgtgcagcggttaacataaccgcccagccagctgcctggcctccctcctgtgtttcccatgccagtggccatgccccatggggatcgcccctcctgcccccttgtgcacacccagcagtccagtgcaacgtctcctccatagctctgggttcttagatcttggttggacgtttgttttctccttagttgcatttcctgggtttttgtgatgatcaatggactttaatgaaaaaaaaaataaaaacaaccaaaggggggcccggtcccaatncccccctt

SEQ ID NO: 288 - DNA, 1669 bp, Homo sapiens
  misc_feature (4)..(4): n equals a,t,g, or c
  misc_feature (54)..(54): n equals a,t,g, or c
  misc_feature (1424)..(1424): n equals a,t,g, or c
  misc_feature (1663)..(1663): n equals a,t,g, or c
gctnctaaatgtctttctcgttctcctcccacccagtcacgtcctccaggcagngaccttcctttatttcacattccgcttacttccttgacccctcagcatttcagacctgaaaggacactggtactgwtgtccttgtcggggcctgtggctttgcctctcattccctggtgaatgtcaggaaatagagggctgagactaatttttataggctctcaatttttcttgcwtggggacaagctgttgacttagctctgaataggagtaataaggaggcagtgggccaggctgcatgacaactggttttcaggcccatataaaaaagtactaactttattatctcaagccatgcctggcctattgcaaagcccagtgtgggtgtcttggggcttgtatttgagattggagcttctctgacctccagtaccctttcctcaggggccacagtgtgtgtcacatgaatggcaaggtgaggtgaggcttgggggagctcctggtgctgtgtcacaccaccttacctgtgtgcattactctgtgcttgttcttttgcatacatctgctgatttgaacctcacggctctgacttaagagcagtaggtagggcatgtggtccttccctcccgtttcaaagacaaggaaagtgagtcacagagtagtgcactggcttacccaggacatacagtggcagagccaagactggagcctagctgcttgtactaaccatgccagtgccaccattaaccccaagtcactagtggtagctacttctgactatgactgtagtcactgtctcctggagaggagcctggccaccagattgatagtcccagctgagactctctcctgaactgataagctgttttgcatgcttggaatgcctttccccagtttgttcacctgataaactcatccttatcctcaagattcagcccagaagacacccttaaaggaagccttggctgtccttcccacccagtgttccctcactgacttctgttgctgctcacactgcattttacctgcttgcctccttccatgtgttcccagctagccagtaaattctttaaagacaagcattgtaccctttgcctcagtgtgcccagcaccaacctggcacatgctctattcatgttttccatgagtgtttcatgttagaggtgtattttgtacacaggttttatgctgggggctcagagagaagtggacagcagattgttggcccwcccaggaagaaaagtcccaacgagctggtggatgatctctttaaaggtgccaaagagcatggagctgtagctgtggagcgagtgacaaagagctggctgatgagagccagaccctgaaggaagccaacctgctcaatgctgtcatcgtgcagcggttaacataaccgcccagccagctgcctggcctccctcctgtgtttncccatggccagtggccatgccccatggggatcgcccctcctgcccccttgtgcayacccagcagtccagtgcaacgtctcctccatagctctgggttcttagatcttggttggacgtttgttttctccttagttgcatttcctgggtttttgtgatgatcaatggactttaatgaaaaaaaaaaaaaaamaaccaaaaaaattgaaaaaaaaaaaaaaaaaaaaaaaaaaaaggggggncccttt

SEQ ID NO: 289 - DNA, 1515 bp, Homo sapiens
  misc_feature (69)..(69): n equals a,t,g, or c
aattcggcacgagggaaattcaagcacttttcctaaaagaagggggaatggatgctgaaacaacacgtntcccacaaagggagcagacactgggcttgtgaagctgccccataccttccccacagaactggggtccggcctccctgacatgcagatttccacccagaagacagagaaggagccagtggtcatggaatgggctggggtcaaagactgggtgcctgggagctgaggcagccaccgtttcagcctggccagccctctggaccccgaggttggaccctactgtgacacacctaccatgcggacactcttcaacctcctctggcttgccctggcctgcagccctgttcacactaccctgtcaaagtcagatgccaaaaaagccgcctcaaagacgctgctggagaagagtcagttttcagataagccggtgcaagaccggggtttggtggtgacggacctcaaagctgagagtgtggttcttgagcatcgcagctactgctcggcaaaggcccgggacagacactttgctggggatgtactgggctatgtcactccatggaacagccatggctacgatgtcaccaaggtctttgggagcaagttcacacagatctcacccgtctggctgcagctgaagagacgtggccgtgagatgtttgaggtcacgggcctccacgacgtggaccaagggtggatgcgagctgtcaggaagcatgccaagggcctgcacatagtgcctcggctcctgtttgaggactggacttacgatgatttccggaacgtcttagacagtgaggatgagatagaggagctgagcaagaccgtggtccaggtggcaaagaaccagcatttcgatggcttcgtggtggaggtctggaaccagctgctaagccagaagcgcgtgaccgaccagctgggcatgttcacgcacaaggagtttgagcagctggcccccgtgctggatggtttcagcctcatgacctacgactactctacagcgcatcagcctggccctaatgcacccctgtcctgggttcgagcctgcgtccaggtcctggacccgaagtccaagtggcgaagcaaaatcctcctggggctcaacttctatggtatggactacgcgacctccaaggatgcccgtgagcctgttgtcggggccaggtacatccagacactgaaggaccacaggccccggatggtgtgggacagccaggyctcagagcacttcttcgagtacaagaagagccgcagtgggaggcacgtcgtcttctacccaaccctgaagtccctgcaggtgcggctggagctggcccgggagctgggcgttggggtctctatctgggagctgggccagggcctggactacttctacgacctgctctaggtgggcattgcggcctccgcggtggacgtgttcttttctaagccatggagtgagtgagcaggtgtgaaatacaggccttcactccgttaaaaaaaaaaaaaaaaaaaaaaaaaaaaaaaaaaaaa

SEQ ID NO: 290 - DNA, 1404 bp, Homo sapiens
  misc_feature (1351)..(1351): n equals a,t,g, or c
cgttttccggccgtgcgtttgtggccgtccggcctccctgacatgcagccctctggaccccgaggttggaccctactgtgacacacctaccatgcggacactcttcaacctcctctggcttgccctggcctgcagccctgttcacactaccctgtcaaagtcagatgccaaaaaagccgcctcaaagacgctgctggagaagagtcagttttcagataagccggtgcaagaccggggtttggtggtgacggacctcaaagctgagagtgtggttcttgagcatcgcagctactgctcggcaaaggcccgggacagacactttgctggggatgtactgggctatgtcactccatggaacagccatggctacgatgtcaccaaggtctttgggagcaagttcacacagatctcacccgtctggctgcagctgaagagacgtggccgtgagatgtttgaggtcacgggcctccacgacgtggaccaagggtggatgcgagctgtcaggaagcatgccaagggcctgcacatagtgcctcggctcctgtttgaggactggacttacgatgatttccggaacgtcttagacagtgaggatgagatagaggagctgagcaagaccgtggtccaggtggcaaagaaccagcatttcgatggcttcgtggtggaggtctggaaccagctgctaagccagaagcgcgtgggcctcatccacatgctcacccacttggccgaggctctgcaccaggcccggctgctggccctcctggtcatcccgcctgccatcacccccgggaccgaccagctgggcatgttcacgcacaaggagtttgagcagctggcccccgtgctggatggtttcagcctcatgacctacgactactctacagcgcatcagcctggccctaatgcacccctgtcctgggttcgagcctgcgtccaggtcctggacccgaagtccaagtggcgaagcaaaatcctcctggggctcaacttctatggtatggactacgcgacctccaaggatgcccgtgagcctgttgtcggggccaggtacatccagacactgaaggaccacaggccccggatggtgtgggacagccaggyctcagagcacttcttcgagtacaagaagagccgcagtgggaggcacgtcgtcttctacccaaccctgaagtccctgcaggtgcggctggagctggcccgggagctgggcgttggggtctctatctgggagctggccagggcctggactacttctacgacctgctctaggtgggcattgcggcctccgcggtggacgtgttcttttctaagccatggagtgagtgagcaggtgtgaaatacaggcctncactccgtttgctgtgaaaaaaaaaaaaaaaaaaaaaaaaaaaaaaaaaaaaa

SEQ ID NO: 291 - DNA, 2008 bp, Homo sapiens
cgggggctttctaacgggaaaaactctactaaagggttcaaaagctggagctccaccgcggtggcggccgctctagaactagtggatcccccgggctgcaggaattcggcacgagctcgtgccgaattcggcacgagtcacagaacacatccatggctctmatgctcagtttggttctgagtctcctcaagctgggwtcagggcagtggcaggtgtttgggccagacaagcctgtccaggccttggtgggggaggacgcagcattctcctgtttcctgtctcctaagaccaatgcagaggccatggaagtgcggttcttcaggggccagttctctagcgtggtccacctctacagggacgggaaggaccagccatttatgcagatgccacagtatcaaggcaggacaaaactggtgaaggattctattgcggaggggcgcatctctctgaggctggaaaacattactgtgttggatgctggcctctatgggtgcaggattagttcccagtcttactaccagaaggccatctgggagctacaggtgtcagcactgggctcagttcctctcatttccatcacgggatatgttgatagagacatccagctactctgtcagtcctcgggctggttcccccggcccacagcgaagtggaaaggtccacaaggacaggatttgtccacagactccaggacaaacagagacatgcatggcctgtttgatgtggagatctctctgaccgtccaagagaacgccgggagcatatcctgttccatgcggcatgctcatctgagccgagaggtggaatccagggtacagataggagatacctttttcgagcctatatcgtggmacctggytaccaaagtactgggaatactctgctgtggcctattttttggcattgttggactgaagattttcttctccaaattccagtggaaaatccaggcggaactggactggagaagaaagcacggacaggcagaattgagagacgcccggaaacacgcagtggaggtgactctggatccagagacggctcacccgaagctctgcgtttctgatctgaaaactgtaacccatagaaaagctccccaggaggtgcctcactctgagaagagatttacaaggaagagtgtggtggcttctcagagtttccaagcagggaaacattactgggaggtggacggaggacacaataaaaggtggcgcgtgggagtgtgccgggatgatgtggacaggaggaaggagtacgtgactttgtctcccgatcatgggtactgggtcctcagactgaatggagaacatttgtatttcacattaaatccccgttttatcagcgtcttccccaggaccccacctacaaaaataggggtcttcctggactatgagtgtgggaccatctccttcttcaacataaatgaccagtcccttatttataccctgacatgtcggtttgaaggcttattgaggccctacattgagtatccgtcctataatgagcaaaatggaactcccagagacaagcaacagtgagtcctcctcacaggcaaccacgcccttcctccccaggggtgaaatgtaggatgaatcacatcccacattcttctttagggatattaaggtctctctcccagatccaaagtcccgcagcagccggccaaggtggcttccagatgaagggggactggcctgtccacatgggagtcaggtgtcatggctgccctgagctgggagggaagaaggctgacattacatttagtttgctctcactccatctggctaagtgatcttgaaataccacctctcaggtgaagaaccgtcaggaattcccatctcacaggctgtggtgtagattaagtagacaaggaatgtgaataatgcttagatcttattgatgacagagtgtatcctaatggtttgttcattatattacactttcagtaaaaaaaaaaaaaaaaaaaaaaaaaaaaaaamctcgagggggggcccggtacccaattcgg

SEQ ID NO: 292 - DNA, 1162 bp, Homo sapiens
ggcacgaggcgccccggactcttctcagttgagagtgcggttcctgggcaggtttccacaccagttcctttccgcgtccttcggccctggctctggctgcctggcggaggtggggtagcatttgtcatttgcacactgctggctttatctttggggctgcaccccgaggcaacaaatgcaggatgctctgtcacccacatgtccaccaccatctggtttgccttttggctactttgactttctccttaaatgcttcctgtgctgagcaaacattccacagccagcagagcaatggagagttcatggccactcttcccagtatcagcaagcaatttggggtgatcgtttggaagcctcagaggaaagatgtcatcaggcttcctgtggctttgtccttcagcatggggctcggcttgctttcacctgccttaggaagatttctggcttctgagctctgatatggggagaagataagggctgggatctttgagtctgcccctagctgggtatgtgcgtccggtgtgcgggccttggagtttttggtaatgactcacttgtgctctttctgggatctgtctccctcccacatgaccccgtggggtccctgaatgactgttttagagtacccatgtgggttccctgagtcacagcaggggatgtttaataaggaggttagcactgagcttggggacgtgctgtcacaccagcaggacgctgcaggaaggagcaggctacttcctttcttgacgtgcaaataactcgtataggctaatcaacaggcttataagttaaaagggctaccgctcggccccttggggattccatcccctcctctgtaacttggagatgtttgtttctgctgcagactcagagggttgcgatgaagagtggtgggactgagttgagaagcttatcccttcgctgggtgggaggtttctaattgccctgttctttgggggatccttaagtccagcttccaggtgggggcagcgataggaccaagttctcctagtagtctctgggaagccacttgagggaagctgccggtcatgcccatgcacccattggtcttctgccagcaggccctgtaggtcgtgccatgttccatgtccttctgggttcttgggggagaaggaagctgttgaaaaaaaaaaaaaaaaaa

SEQ ID NO: 293 - DNA, 754 bp, Homo sapiens
ttaaccctcactaaagggaacaaaagctggagctccaccgcggtggcggccgctctagaactagtggatcccccgggctgcaggaattcggcacgagcactgcagctccctgagcactctctacagagacgcggaccccagacatgaggaggctcctcctggtcaccagcctggtggttgtgctgctgtgggaggcaggtgcagtcccagcacccaaggtccctatcaagatgcaagtcaaacactggccctcagagcaggacccagagaaggcctggggcgcccgtgtggtggagcctccggagaaggacgaccagctggtggtgctgttccctgtccagaagccgaaactcttgaccaccgaggagaagccacgaggcaccaaggcctggatggagaccgaggacaccctgggccgtgtcctgagtcccgagcccgaccatgacagcctgtaccaccctccgcctgaggaggaccagggcgaggagaggccccggttgtgggtgatgccaaatcaccaggtgctcctgggaccggaggaagaccaagaccacatctaccacccccagtaggggctccaggggccatcactgcccccgccctgtcccaaggcccaggctgttgggactgggaccctccctaccctgccccagctagacaaataaaccccagcaggccggaaaaaaaaaaaaaaaaaaaaaaaaaaaaaaaaaaaaaaaaaaaaaaaaaaaaaaaaaaaaaaaaaaaaaaaaaa

SEQ ID NO: 294 - DNA, 667 bp, Homo sapiens
ggcacgagcactgcagctccctgagcactctctacagagacgcggaccccagacatgaggaggctcctcctggtcaccagcctggtggttgtgctgctgtgggaggcaggtgcagtcccagcacccaaggtccctatcaagatgcaagtcaaacactggccctcagagcaggacccagagaaggcctggggcgcccgtgtggtggagcctccggagaaggacgaccagctggtggtgctgttccctgtccagaagccgaaactcttgaccaccgaggagaagccacgaggcaccaaggcctggatggagaccgaggacaccctgggccgtgtcctgagtcccgagcccgaccatgacagcctgtaccaccctccgcctgaagaggaccagggcgaggagaggccccggttgtaggtgatgccaaatcaccaggtgctcctgggaccggaggaagaccaagacacatctaccacccccagtaggggctccaggggccatcaatgcccccgccctgtcccaaggcccaggctgttgggactgggaccctccctaccctgccccagctagacaaataaaccccagcaggccggaaaaaaaaaaaaaaaaaaaaaaaaaaaaaaaaaaaaaaaaaaaaaaaaaaaaaaaaaaaaaaaaaaaaaaaaaaaaa

SEQ ID NO: 295 - DNA, 1315 bp, Homo sapiens
acgcgtccggacgccgccacctccggaacaagccatggtggcggctacggtggcagcggcgtggctgctcctgtgggctgcggcctgcgcgcagcaggagcaggacttctacgacttcaaggcggtcaacatccggggcaaactggtgtcgctggagaagtaccgcggatcggtgtccctggtggtgaatgtggccagcgagtgcggcttcacagaccagcactaccgagccctgcagcagctgcagcgagacctgggcccccaccacttcaacgtgctcgccttcccctgcaaccagtttggccaacaggagcctgacagcaacaaggagattgagagctttgcccgccgcacctacagtgtctcattccccatgtttagcaagattgcagtcaccggtactggtgcccatcctgccttcaagtacctggcccagacttctgggaaggagcccacctggaacttctggaagtacctagtagccccagatggaaaggtggtaggggcttgggacccaactgtgtcagtggaggaggtcagaccccagatcacagcgctcgtgaggaagctcatcctactgaagcgagaagacttataaccaccgcgtctcctcctccaccacctcatcccgcccacctgtgtggggctgaccaatgcaaactcaaatggtgcttcaaagggagagacccactgactctccttcctttactcttatgccattggtcccatcattcttgtgggggaaaaattctagtattttgattatttgaatcttacagcaacaaataggaactcctggccaatgagagctcttgaccagtgaatcaccagccgatacgaacgtcttgccaacaaaaatgtgtggcaaatagaagtatatcaagcaataatctcccacccaaggcttctgtaaactgggaccaatgattacctcatagggctgttgtgaggattaggatgaaatacctgtgaaagtgcctaggcagtgccagccaaataggaggcattcaatgaacattttttgcacataaaccaaaaaataacttgttatcaataaaaacttgcatccaacatgaatttccagccgatgataatccaggccaaaggtttagttgttgttatttcctctgtattattttcttcattacaaaagaaatgcaagttcattgtaacaatccaaacaatacctcacgatataaaataaaaatgaaagtatcctcctcaaaaaaaaaaaaaaaaaaaaaaaaaaaaaaaaaaaaaaaaaaaaaaaaaaaaaaaaaaaaaaaaaaaaaaaaaaaaaaaaaaaaaaaaaaaa

SEQ ID NO: 296 - DNA, 1138 bp, Homo sapiens
gggcgcctgtagtcccagctattcaggaggccgaggcaggagaattgcctgaactcaggaggcggasttgcagtgagccgagatcgcgccattgcactccagcctgggtgacagagtgagactctttctcccaaaaaaaaaaaaaaaaaaaaagtcaaatgcagctgggaatgtggttcgtgcctttttgtatattaaccatttgaaacttggttgtaaggtggggttggcaatgtcaggcctggctgcagcagctcatgtctttagagtgtgcctcttccctctctcgtggggctcgagcaagactaccttcatacatgggctctccagttacatagcaactccagtgttaaattccatcttttcttcctggaaaagccgtagaaaggacacctggacatgcctgctgcacaggttgtctgccttccccatcagccscagaaggaggaactttgctctcttctctcacagctgtgtgtgcataagaagtagttcggatgatgtgggtcccaccatgtattccttctctgttccatgtagagtaaaataaatgggagttctgtttaatgcatcacctcggttcatattgcatttgccaagaaagtgcaattttattgaacattaggattgaattcttaactgagtaatcaatttcagtagtaagttaaaatgccttctattaatggacaactgcaaccgttaatcagagttacagtagattaacagttgtcagcatttatgctaatagcactaataaaccgtgggctcatgatttgcactttataattccatatttctcaaaacagttggtaatactttttgcttgaaggtattgattcttttgtccctttgcttgctacttggagatgtagagaaagctaaatgacattttcacggtgatgacacaatatcaccttctgcttttgcacacttggctttgtgtcaaaatagatggaaagggttcatttgttctggtgctctactgtttaatttgatctggtgtgtgactaaagcaagacaaatagtatttttaatgaaaccatttaataacctctggtagcttagagtcgaaggcattggaaaaatgcaattaaaggatgcctagatgtaaacaaaaaaaaaaaaaaagggcggccgc

SEQ ID NO: 297 - DNA, 1037 bp, Homo sapiens
  misc_feature (12)..(12): n equals a,t,g, or c
tcgacccacgcntccggataggcacaggacaggagtaggcacctcgcctactgctgcttaacctttcagcttctccaggcccccaatcctgcttgcacccagcttgggaacgagacactgctgagctggaagacttcgcgggccacaggcacagccttcctgctgctggcggcgctgctggggctgcctggcaacggcttcgtggtgtggagcttggcgggctggcggcctgcacgggggcgaccgctggcggccacgcttgtgctgcacctggcgctggccgacggcgcggtgctgctgctcacgccgctctttgtggccttcctgacccggcaagcctggccgctgggccaggcgggctgcaaggcggtgtactacgtgtgcgcgctcagcatgtacgccagcgtgctgctcaccggcctgctcagcctgcagcgctgcctcgcggtcacccgccccttcctggcgcctcggtgcgcagcccggccctggcccgccgcctgctgctggcggtctggctggccgccctgttgctcgccgtcccggccgccgtctaccgccacctgtggagggaccgcgtatgccagctgtgccacccgtcgccggtccacgccgccgcccacctgagcctggagactctgaccgctttcgtgcttcctttcgggctgatgctcggctgctacagcgtgacgctggcacggctgcggggcgcccgctggggctccgggcggcacggggcgcgggtgggccggctggtgagcgccatcgtgccttcttcggcttgctctgggccccctaccacgcagtcaaccttctgcaggcggtcgcagcgctggctccaccggaaggggccttggcgaagctgggcggagccggccaggcggcgcgagcgggaactacggccttggccttcttcagttctagcgtcaacccggtgctctacgtcttcaccgctggagatctgctgccccgggcaggtccccgtttcctcacgcggctcttcgaaggctctggggaggcccgagggggcggccgct

SEQ ID NO: 298 - DNA, 1203 bp, Homo sapiens
gatctgtctttttgcttttagcatcctaatgagtatgaaatgctatcttgtggttttgatttgcattcccctgatggcaactgatgctgagtgtcttttcctgtgcttacgggccatgcgtatttctttggagaaaggtctatccaggtcctttgcctatttttaattgagttgtcttttttttttaagttttctgttttcctaaccactagactaccagggatgagyyttctttttattattgagttgggtgagctatttgtatattctagacgccagtcttttatcmsgyatmtgactggtaaaaatgttctccccttctgtggattgttttcagtttcttgttggtgtcctttgagacacaaaactttttaactttgatgatttccaagatacgtattttttttctattgtcacttgtgcttttggtgccatatctagaaaaccattgcctaatccaaggtcaagaagattaatgcctgtgttttcttctaagaacttgtatagttttagttctcacaatggtctttgatccatttcgagtatatttttatatatgatgtgatgtaggggtccagcttcattcttttgcttgtggatctccacttgtcccactgctggattattgagaaaaatatcctttctccacggaattgycttggcatccttgctaaaggcctctgcttcttactggatcttctttcctgggacatggtgtcgttgggaagcttaccttttkttttttttacttagtctgtgtttggttccaccagttttatgctgcctttctactctgttcttgctgtctccctcyttacctgagtcaacggtactgagtcctatctctctctgatgttccccagtcttccttggtgcatgttctagctccacacactagtccttggaggaaggttgagaccaatgatttcctgttatgagtcatgaggaaactgaatcacctagaagtggaataatgtgctcagggtcaccatagcccattagtggaaggaccaggactagacctttagtcttctgaggtccagccccttaggctgtctgtcatcactgtacccaagtgatgtcactaccaaggccaaatgatggtgggctaaattttaattctcaaaagtgtaggaggctaatattgtcttctaagttccaaaagaagatgtaataaaagtctgttaccttaaaaaaaaaaaa

SEQ ID NO: 299 - DNA, 1144 bp, Homo sapiens
  misc_feature (3)..(3): n equals a,t,g, or c
  misc_feature (10)..(10): n equals a,t,g, or c
  misc_feature (24)..(24): n equals a,t,g, or c
ctntctatanatcatgtaggaaanggtacctgacgtacggtcsgaattcccgggtcgacccacgygtccgccacgtttgtggcgtacgagctcacggtgctggtgttcctcaccttgtcagtggtggtgatgaagtttctcctggcggcgctggtcctgtctctcattctgccgaggagcagccagtacatcaagtggatcgtctctgcggggcttgcccaggtcagcgagttttcctttgtcctggggagccgggcgcgaagagcgggcgtcatctctcgggaggtgtacctccttatactgagtgtgaccacgctcagcctcttgctcgccccggtgctgtggagagctgcaatcacgaggtgtgtgcccagaccggagagacggtccagcctctgatggctcggagatgatggaccgtggaagggaagcgtctgtggggagtgagcgcttagatggccagcagctgctccttctgggaagctcgcaccttggcaacagaacagccctctagcagagcgtcagtgcagtcgtgttatcccggcttttacagaatattcttgtcctattttagaattttccggagtagtttatttgcagtctgttgattatgtgcagtagacccgggacactgcgttttaccgatcaccttgaatgtggtgcctggatgtgccttttttttttttccctgaaattattattaattttctattgtgagttcatcagttcatagtttttttagtaaagaagcaaaattaaaaggcttttaaaaatgtacaacttcagaattataatctgttagtcaaatatttgttattaaacatttctgtaatatgaagttgtaatcctggccgtgagcttggaagcttacttttgattcttaaagcctatgttttctaaaatgagacaaatacggatgtctatttgccttttattgtaacttttaaatgaaataatttcatgtcaatttctattagatatatcacttaaaatatttggttttaaatcacaagaatatgtattctttaataaagataatttatgatcatggtataattaattgaaatttattaaaatctgtttttattaaaaaaaaaaaaaaaaaaactcgagggggggcccggtacccaattcgccctaggaa

SEQ ID NO: 300 - DNA, 1120 bp, Homo sapiens
ggaggagaacgccacctccatcgaacccatccgcgacttcctggccatcgttttcttcgcctccatagggctccacgtgttccccacgtttgtggcgtacgagctcacggtgctggtgttcctcaccttgtcagtggtggtgatgaagtttctcctggcggcgctggtcctgtctctcattctgccgaggagcagccagtacatcaagtggatcgtctctgcggggcttgcccaggtcagcgagttttcctttgtcctggggagccgggcgcgaagagcgggcgtcatctctcgggaggtgtacctccttatactgagtgtgaccacgctcagcctcttgctcgccccggtgctgtggagagctgcaatcacgaggtgtgtgcccagaccggagagacggtccagcctctgatggctcggagatgatggaccgtggaagggaagcgtctgtggggagtgagcgcttagatggccagcagctgctccttctgggaagctcgcaccttggcaacagaacagccctctagcagagcgtcagtgcagtcgtgttatcccggcttttacagaatattcttgtcctattttagaattttccggagtagtttatttgcagtctgttgattatgtgcagtagacccgggacactgcgttttaccgatcaccttgaatgtggtgcctggatgtgccttttttttttttccctgaaattattattaattttctattgtgagttcatcagttcatagtttttttagtaaagaagcaaaattaaaaggcttttaaaaatgtacaacttcagaattataatctgttagtcaaatatttgttattaaacatttctgtaatatgaagttgtaatcctggccgtgagcttggaagcttacttttgattcttaaagcctatgttttctaaaatgagacaaatacggatgtctatttgccttttattgtaacttttaaatgaaataatttcatgtcaatttctattagatatatcacttaaaatatttggttttaaatcacaagaatatgtattctttaataaagataatttatgatcatggtataattaattgaaatttattaaaatctgtttttattaaaaaaaaaaaaaaaaaaa

SEQ ID NO: 301 - DNA, 4385 bp, Homo sapiens
  misc_feature (3476)..(3476): n equals a,t,g, or c
gacctcgataacagttatcccctgattctgtggataaccgtattaccgcctttgagtgagctgataccgctcgccgcagccgaacgaccgagcgcagcgagtcagtgagcgaggaagcggaagagcgcccaatacgcaaaccgcctctccccgcgcgttggccgattcattaatgcagctggcacgacaggtttcccgactggaaagcgggcagtgagcgcaacgcaattaatgtgagttagctcactcattaggcaccccaggctttacactttatgcttccggctcgtatgttgtgtggaattgtgagcggataacaatttcacacaggaaacagctatgaccatgattacgccaagctcgaaattaaccctcactaaagggaacaaaagctggagctccaccgcggtggcggccgctctagaactagtggatcccccgggctgcaggaattcggcacgagcgacatggcgctgaggcggccaccgcgactccggctctgcgctcggctgcctgacttcttcctgctgctgcttttcaggggctgcctgataggggctgtaaatctcaaatccagcaatcgaaccccagtggtacaggaatttgaaagtgtggaactgtcttgcatcattacggattcgcagacaagtgaccccaggatcgagtggaagaaaattcaagatgaacaaaccacatatgtgttttttgacaacaaaattcagggagacttggcgggtcgtgcagaaatactggggaagacatccctgaagatctggaatgtgacacggagagactcagccctttatcgctgtgaggtcgttgctcgaaatgaccgcaaggaaattgatgagattgtgatcgagttaactgtgcaagtgaagccagtgacccctgtctgtagagtgccgaaggctgtaccagtaggcaagatggcaacactgcactgccaggagagtgagggccacccccggcctcactacagctggtatcgcaatgatgtaccactgcccacggattccagagccaatcccagatttcgcaattcttctttccacttaaactctgaaacaggcactttggtgttcactgctgttcacaaggacgactctgggcagtactactgcattgcttccaatgacgcaggctcagccaggtgtgaggagcaggagatggaagtctatgacctgaacattggcggaattattgggggggttctggttgtccttgctgtactggccctgatcacgttgggcatctgctgtgcatacagacgtggctacttcatcaacaataaacaggatggagaaagttacaagaacccagggaaaccagatggagttaactacatccgcactgacgaggagggcgacttcagacacaagtcatcgtttgtgatctgagacccgcggtgtggctgagagcgcacagagcgcacgtgcacatacctctgctagaaactcctgtcaaggcagcgagagctgatgcactcggacagagctagacactcattcagaagcttttcgttttggccaaagttgaccactactcttcttactctaacaagccacatgaatagaagaattttcctcaagatggacccggtaaatataaccacaaggaagcgaaactgggtgcgttcactgagttgggttcctaatctgtttctggcctgattcccgcatgagtattagggtgatcttaaagagtttgctcacgtaaacgcccgtgctgggccctgtgaagccagcatgttcaccactggtcgttcagcagccacgacagcaccatgtgagatggcgaggtggctggacagcaccagcagcgcatcccggcgggaacccagaaaaggcttcttacacagcagccttacttcatcggcccacagacaccaccgcagtttcttcttaaaggctctgctgatcggtgttgcagtgtccattgtggagaagctttttggatcagcattttgtaaaaacaaccaaaatcaggaaggtaaattggttgctggaagagggatcttgcctgaggaaccctgcttgtccaacagggtgtcaggatttaaggaaaaccttcgtcttaggctaagtctgaaatggtactgaaatatgcttttctatgggtcttgtttattttataaaattttacatctaaatttttgctaaggatgtattttgattattgaaaagaaaatttctatttaaactgtaaatatattgtcatacaatgttaaataacctatttttttaaaaaagttcaacttaaggtagaagttccaagctactagtgttaaattggaaaatatcaataattaagagtattttacccaaggaatcctctcatggaagtttactgtgatgttccttttctcacacaagttttagcctttttcacaagggaactcatactgtctacacatcagaccatagttgcttaggaaacctttaaaaattccagttaagcaatgttgaaatcagtttgcatctcttcaaaagaaacctctcaggttagctttgaactgcctcttcctgagatgactaggacagtcggtacccagaggccacccagaagccctcagatgtacatacacagatgccagtcagctcctggggttgcgccaggcgcccccgctctagctcactgttgcctcgctgtctgccaggaggccctgccatccttgggccctggcagtggctgtgtcccagtgagctttactcacgtggcccttgcttcatccagcacagctctcaggtgggcactgcagggacactggtgtcttccatgtagcgtcccagctttgggctcctgtaacagacctctttttggttatggatggctcacaaaatagggcccccaatgctattttttttttttaagtttgtttaattatttgttaagattgtctaaggccaaaggcaattgcgaaatcaagtctgtcaagtacaataacatttttaaaagaaaatggatcccactgttcctctttgccacagagaaagcacccagacgccacaggctctgtcgcatttcaaaacaaaccatgatggagtggcggccagtccagccttttaaagaacgtcaggtggagcagccaggtgaaaggcctggcggggaggaaagtgaaacgcctgaatcaaaagcagttttctaattttgactttaaatttttcatccgccggagacactgctcccatttgtggggggacattagcaacatcactcagaagcctgtgttcttcaagagcaggtgttctcagcctcacatgccctgccgtgctggactcaggactgaagtgctgtaaagcaaggagctgctgagaaggagcactccactgtgtgcctggagaatggctctcactactcaccttgtctttcagcttccagtgtcttgggttttttatactttgacagcttttttttaattgcatacatgagactgtgttgactttttttagttatgtgaaacactttgccgcagnccgcctggcagaggcaggaaatgctccagcagtggctcagtgctccctggtgtctgctgcatggcatcctggatgcttagcatgcaagttccctccatcattgccaccttggtagagagggatggctccccaccctcagcgttggggattcacgctccagcctccttcttggttgtcatagtgatagggtagccttattgccccctcttcttataccctaaaaccttctacactagtgccatgggaaccaggtctgaaaaagtagagagaagtgaaagtagagtctgggaagtagctgcctataactgagactagacggaaaaggaatactcgtgtattttaagatatgaatgtgactcaagactcgaggccgatacgaggctgtgattctgcctttggatggatgttgctgtacacagatgctacagacttgtactaacacaccgtaatttggcatttgtttaacctcatttataaaagcttcaaaaaaacccaaaaaaaaaaaaaaaaaaaaatgaccctcgagggggggcccggtacccaattcgccctatagtgagtcgtattacaattcactggccgtcgttttacaacgtcgtgactgggaaaaccctggcgttacccaacttaatcgccttgcagcacatccccctttcgccagctggcgtaatagcgaagaggcccgcaccgatcgcccttcccaacagttgcgcagcctgaatggcgaatggcaaattgtaagcgttaatattttgttaaaattcgcgttaaatttttgttaaatcagctcattttttaaccaataggccgaaatcggcaaaatcccttataaatcaaaagaatagaccgagatagggttgagtgttgttccagtttggaacaagagtccacgattaaagaatgttatcg

SEQ ID NO: 302 - DNA, 4386 bp, Homo sapiens; identical to SEQ ID NO: 202
  misc_feature (3477)..(3477): n equals a,t,g, or c

SEQ ID NO: 303 - DNA, 1314 bp, Homo sapiens
atgcggcagctcttctatgaccctgacgagtgcgggctgatgaagaaggggggcttgtacttcagtgacttctggaataagctggacgtcggcgcaatcttgctcttcgtggcagggctgacctgcaggctcatcccggcgacgctgtaccccgggcgcgtcatcctctctctggacttcatcctgttctgcctccggctcatgcacatttttaccatcagtaagacgctggggcccaagatcatcattgtgaagcggatgatgaaggacgtcttcttcttcctcttcctgctggctgtgtgggtggtgtccttcggggtggccaagcaggccatcctcatccacaacgagcgccgggtggactggctgttccgagggccgtctaccactcctacctcaccatcttcgggcagatcccgggctacatcgacggtgtgaacttcaacccggagcactgcagccccaatggcaccgacccctacaagcctaagtgccccgagagcgacgcgacgcagcagagccggccttccctgagtggctgacggtcctcctactctgcctctacctgctcttcaccaacatcctgctgctcaacctcctcatcgccatgttcaactacaccttccagcaggtgcaggagcacacggaccagatttggaagttccagcgccatgacctgatcgaggagtaccacggccgccccgccgtgccgcccccgttgatcctcttcagccacctgcagctcttcatcaagagggtggtcctgaagactccggccaagaggcacaagcagctcaagaacaagctggagaagaacgaggaggcggccctgctatcctgggagatctacctgaaggagaactacctccagaaccgacagttccagcaaaagcagcggcccgagcagaagatcgaggacatcagcaataaggttgacgccatggtggacctgctggacctggacccactgaagaggtcgggctccatggagcagaggttggcctccctggaggagcaggtggcccagacagcccgagccctgcactggatcgtgaggacgctgcgggccagcggcttcagctcggaggcggacgtccccactctggcctcccagaaggccgcggaggagccggatgctgagccgggaggcaggaagaagacggaggagccgggcgacagctaccacgtgaatgcccggcacctcctctaccccaactgccctgtcacgcgcttccccgtgcccaacgagaaggtgccctgggagacggagttcctgatctatgacccacccttttacacggcagagaggaagga

SEQ ID NO: 304 - DNA, 1932 bp, Homo sapiens
  misc_feature (293)..(293): n equals a,t,g, or c
ggcacgaggccgccctgggtgtcagcggctcggctcccgcgcacgctccggccgtcgcgcasctcggcacctgcaggtccgtgcgtcccgcggctggcgcccctgactccgtcccggccagggagggccatgatttccctcccggggcccctggtgaccaacttgctgcggtttttgttcctggggctgagtgccctcgcgcccccctcgcgggcccagctgcaactgcacttgcccgccaaccggttgcaggcggtggagggaggggaagtggtgcttccagcgtggtacancttgcacggggaggtgtcttcatcccagccatgggaggtgccctttgtgatgtggttcttcaaacagaaagaaaaggaggatcaggtgttgtcctacatcaatggggtcacaacaagcaaacctggagtatccttggtctactccatgccctcccggaacctgtccctgcggctggagggtctccaggagaaagactctggcccctacagctgctccgtgaatgtgcaagacaaacaaggcaaatctaggggccacagcatcaaaaccttagaactcaatgtactggttcctccagctcctccatcctgccgtctccagggtgtgccccatgtgggggcaaacgtgaccctgagctgccagtctccaaggagtaagcccgctgtccaataccagtgggatcggcagcttccatccttccagactttctttgcaccagcattagatgtcatccgtgggtctttaagcctcaccaacctttcgtcttccatggctggagtctatgtctgcaaggcccacaatgaggtgggcactgccaatgtaatgtgacgctggaagtgagcacagggcctggagctgcagtggttgctggagctgttgtgggtaccctggttggactggggttgctggctgggctggtcctcttgtaccaccgccggggcaaggccctggaggagccagccaatgatatcaaggaggatgccattgctccccggaccctgccctggcccaagagctcagacacaatctccaagaatgggaccctttcctctgtcacctccgcacgagccctccggccaccccatggccctcccaggcctggtgcattgacccccacgcccagtctctccagccaggccctgccctcaccaagactgcccacgacagatggggcccaccctcaaccaatatcccccatccctggtggggtttcttcctctggcttgagccgcatgggtgctgtgcctgtgatggtgcctgcccagagtcaagctggctctctggtatgatgaccccaccactcattggctaaaggatttggggtctctccttcctatargggtcacctctagcacagaggcctgagtcatgggaaagagtcacactcctgacccttagtactctgcccccacctctctttactgtgggaaaaccatctcagtaagacctaagtgtccaggagacagaaggagaagaggaagtggatctggaattgggaggagcctccacccacccctgactcctccttatgaagccagctgctgaaattagctactcaccaagagtgaggggcagagacttccagtcactgagtctcccaggcccccttgatctgtaccccacccctatctaacaccacccttggctcccactccagctccctgtattgatataacctgtcaggctggcttggttaggttttactggggcagaggatagggaatctcttattaaaactaacatgaaatatgtgttgttttcatttgcaaatttaaataaagatacataatgtttgtatgaraaaaaaaaaaaaaaaaaaaaaagggcggccgctctagaggatccctcgaggggcccaagcttacgcgtgcatgcgacgtcatagctctctccctatagtgagtcgtattataagctagg

SEQ ID NO: 305 - protein, 72 aa, Homo sapiens
MPSIRLGLSHLFLTAGIYCLLLCARCCALGRGTAWAACPGGACGLMGEADPSPPHCQQGQGKSTHRGLIPYV

SEQ ID NO: 306 - protein, 131 aa, Homo sapiens
  SITE (43): Xaa equals any of the naturally occurring L-amino acids
  SITE (44): Xaa equals any of the naturally occurring L-amino acids
  SITE (49): Xaa equals any of the naturally occurring L-amino acids
  SITE (66): Xaa equals any of the naturally occurring L-amino acids
  SITE (78): Xaa equals any of the naturally occurring L-amino acids
  SITE (94): Xaa equals any of the naturally occurring L-amino acids
  SITE (102): Xaa equals any of the naturally occurring L-amino acids
MWSVIRSLCPSRLQSLHVCFCPRLCLAVPCVFHLSSPWFHVRXXFFSGXPGCIWGICFVGLLLGAXRPRSGCLCSPSXCLWSLVVCESICLPRXGPNQAPPXPLFLSLNLPFLFQPLQMRWLSAVGWREAM

SEQ ID NO: 307 - protein, 182 aa, Homo sapiens
MKGWGWLALLLGALLGTAWARRSQDLHCGACRALVDELEWEIAQVDPKKTIQMGSFRINPDGSQSVVEVPYARSEAHLTELLEEICDRMKEYGEQIDPSTHRKNYVRVVGRNGESSELDLQGIRIDSDISGTLKFACESIVEEYEDELIEFFSREADNVKDKLCSKRTDLCDHALHISHDEL

SEQ ID NO: 308 - protein, 62 aa, Homo sapiens
MVAVTGGVGVAAALCLCSLLLWPTRLRRSRGGEHRTPSEGEGISTAPPPCWNETQPQGGAKL

SEQ ID NO: 309 - protein, 49 aa, Homo sapiens
MRLCSFTKVPMNLFLNVILLKFYNFLFSLILGKSCLASLGLCKNNKCLS

SEQ ID NO: 310 - protein, 218 aa, Homo sapiens
MGSAALEILGLVLCLVGWGGLILACGLPMWQVTAFLDHNIVTAQTTWKGLWMSCVVQSTGHMQCKVYDSVLALSTEVQAARALTVSAVLLAFVALFVTLAGAQCTTCVAPGPAKARVALTGGVLYLFCGLLALVPLCWFANIVVREFYDPSVPVSQKYELGAALYIGWAATALLMVGGCLLCCGAWVCTGRPDLSFPVKYSAPRRPTATGDYDKKNYV

SEQ ID NO: 311 - protein, 44 aa, Homo sapiens
MQCDTFSKATCCKILLLSCCVLYLVFSRLRGLDQRSKRYSLPDH

SEQ ID NO: 312 - protein, 181 aa, Homo sapiens
MTSRRSSTLSMTSSLLSLGCALTSAFPASTMSWVPLLQMLDQSPRRVMRKSVSQLCPLLRPHPPLSSKHPLVLPLQLPPTFLHLLPGPGCPGQTVAYWLLEFLSRATLKLYPGDRPLWLQPTRLNFKDHWTIFSVASAALFCVHRMATDRHASFPTHWKAHRQGERGHRRCQHCRYSKDLK

SEQ ID NO: 313 - protein, 66 aa, Homo sapiens
  SITE (12): Xaa equals any of the naturally occurring L-amino acids
MNLSIILPNSFXHLCNFSLFLLPLPVPSQPLICSGNYQSSFCHYRLICIFKEIYIHGTIHHLCFVV

SEQ ID NO: 314 - protein, 94 aa, Homo sapiens [sequence omitted]

SEQ ID NO: 315 - protein, 191 aa, Homo sapiens
MAAPRGRAAPWTTALLLLLASQVLSPGSCADEEEVPEEWVLLHVVQGQIGAGNYSYLRLNHEGKIVLRMRSLKGDADLYVSASSLHPSFDDYELQSATCGPDAVSIPAHFRRPVGIGVYGHPSHLESEFEMKVYYDGTVEQHPFGEAAYPADGADAGQKHAGAPEDASQEEESVLWTILISILKLELEILF

SEQ ID NO: 316 - protein, 129 aa, Homo sapiens
MHVLPLLLSLLLLLLLLSASFVTFSTPTSSRNSSCPDCESLNTGLPSLMMFGGSLLKWVQNTHGVESLLSSAKVRLLPPALGVLFPRLHPGTLTLVFLLIPFLTVSSSTSDVLSSLESPKLSVTIFHYC

SEQ ID NO: 317 - protein, 385 aa, Homo sapiens
MSFIMKLHRHFQRTVILLATFCMVSIIISAYYLYSGYKQENELSETASEVDCGDLQHLPYQLMEVKAMKLFDASRTDPTVLVFVESQYSSLGQDIIMILESSRFQYHIEIAPGKGDLPVLIDKMKGKYILIIYENILKYINMDSWNRSLLDKYCVEYGVGVIGFHKTSEKSVQSFQLKGFPFSIYGNLAVKDCCINPHSPLIRVTKSSKLEKGSLPGTDWTVFQINHSAYQPVIFAKVKTPENLSPSISKGAFYATIIHDLGLHDGIQRVLFGNNLNFWLHKLIFIDAISFLSGKRLTLSLDRYILVDIDDIFVGKEGTRMNTNDVKVRLYFLKFQSSVHLPAGIQLSQFVLQLGYPGHGIYWESLGNLGLSLTLNQLRRLCISI

SEQ ID NO: 318 - protein, 110 aa, Homo sapiens
MTVSYFWWLRVGAWAEDVEALASLPEDRLRWNLLALPASPCAVTALVARHRRAGLQRSIQCLLGRQGGGGCNCELTKPQVGSKWVGHRKKSDLQSGDLGSGLCLMTGSVM

SEQ ID NO: 319 - protein, 258 aa, Homo sapiens [sequence omitted]

SEQ ID NO: 320 - protein, 38 aa, Homo sapiens
MKNMNSRYYLRAIFCLYTLACILFLQIILKARCGGSRL

SEQ ID NO: 321 - protein, 146 aa, Homo sapiens
MLMPVHFLLLLLLLLGGPRTGLPHKFYKAKPIFSCLNTALSEAEKGQWEDASLLSKRSFHYLRSRDASSGEEEEGKEKKTFPISGARGGARGTRYRYVSQAQPRGKPRQDTAKSPHRTKFTLSLDVPTNIMNLLFNIAKAKNLRAQ

SEQ ID NO: 322 - protein, 199 aa, Homo sapiens
MRRLLLALPFALLPLAVAHAHEDHDHEHGSLGAHEHGVGRLNAVLDGQALELELDSPAMNLVGFEHVATSAADKAKVAAVRKQLENPSALFNLPKAAGCVVSSQELNSPLFGDKPEAEHDDDDHASDGKGAAAHKHDHDHSEIHAHYQFTCATPTALGNLDLSQVFKTFPATQKIQVQLIGPSGQQGVDATATAATLKF

SEQ ID NO: 323 - protein, 84 aa, Homo sapiens
  SITE (65): Xaa equals any of the naturally occurring L-amino acids
MWVFFLPFFSILFKICWCISLSQTKEKQSSNLMFYFFCICTYERRRKKEMRRGEKKRSFCLIGLXQHMIAVQAWFHEQHQIQIS

SEQ ID NO: 324 - protein, 74 aa, Homo sapiens [sequence omitted]

SEQ ID NO: 325 - protein, 57 aa, Homo sapiens
MAVSVIFCQKLKTGSVKLWIQMLLWLQFSVACLRLRKGGKWSPWGLMLKEVIWKDCR

SEQ ID NO: 326 - protein, 83 aa, Homo sapiens
MLSLFFCFWKPSFLVSRLVIWLGLVCGGRSLSWVALGEDYLGTPILIPNIHQTCPHPPLWELVPEHPCRLVLIFSLCEHTHIR

SEQ ID NO: 327 - protein, 30 aa, Homo sapiens
MVSLLSLTFHQFVSSLKYFKLLSTSRQEIL

SEQ ID NO: 328 - protein, 336 aa, Homo sapiens [sequence omitted]

SEQ ID NO: 329 - protein, 60 aa, Homo sapiens
MVSRSTSLTLIVFLFHRLSKAPGKMVENSPSPLPERAIYGFVLFLSSQFGFKNLKGSRVC

SEQ ID NO: 330 - protein, 224 aa, Homo sapiens
MGIFPGIILIFLRVKFATAAVIVSGHQKSTTVSHEMSGLNWKPFVYGGLASIVAEFGTFPVDLTKTRLQVQGQSIDARFKEIKYRGMFHALFRICKEEGVLALYSGIAPALLRQASYGTIKIGIYQSLKRLFVERLEDETLLINMICGVVSGVISSTIANPTDVLKIRMQAQGSLFQGSMIGSFIDIYQQEGTRGLWRVSTLFLLLSYTLSSYNLQRIFFYIKT

SEQ ID NO: 331 - protein, 58 aa, Homo sapiens
MSSFPGPQCVQLINLLHLICPVSGLVCSAITIALRQKSIPHQQGREAVIKTPPPGSLP

SEQ ID NO: 332 - protein, 46 aa, Homo sapiens
MDLLQVCFFLFFSHLWSWTEGKLPCNFPGPVGRVFLSPFQMLGFKQ

SEQ ID NO: 333 - protein, 47 aa, Homo sapiens
MFYPPCPFFPQLCFCIFFLGKCKLSLSFMTCEISVSLEFVRRRGNHA

SEQ ID NO: 334 - protein, 40 aa, Homo sapiens
MIILHIVVCLFTISIIEEQKEEILCSTKSQAEKTVTHIEQ

SEQ ID NO: 335 - protein, 65 aa, Homo sapiens [sequence omitted]

SEQ ID NO: 336 - protein, 108 aa, Homo sapiens
  SITE (62): Xaa equals any of the naturally occurring L-amino acids
  SITE (63): Xaa equals any of the naturally occurring L-amino acids
MGAAKVWGEVGRWLVIALIQLAKAVLRMLLLLWFKAGLQTSPPIVPLDRETRHSPRMVTTAXXTMSSPTWGSGQTGWCEPSRTRRPCTPGTGELPSSGRDGSSSITRS

SEQ ID NO: 337 - protein, 413 aa, Homo sapiens
MRRGCAVLGALGLLAGAGVGSWLLVLYLCPAASQPISGTLQDEEITLSCSEASAEEALLPALPKTVSFRINSEDFLLEAQVRDQPRWLLVCHEGWSPALGLQICWSLGHLRLTHHKGVNLTDIKLNSSQEFAQLSPRLGGFLEEAWQPRNNCTSGQVVSLRCSECGARPLASRIVGGQSVAPGRWPWQASVALGFRHTCGGSVLAPRWVVTAAHCMHSFRLARLSSWRVHAGLVSHSAVRPHQGALVERIIPHPLYSAQNHDYDVALLRLQTALNFSDTVGAVCLPAKEQHFPKGSRCWVSGWGHTHPSHTYSSDMLQDTVVPLFSTQLCNSSCVYSGALTPRMLCAGYLDGRADACQGDSGGPLVCPDGDTWRLVGVVSWGRGCAEPNHPGVYAKVAEFLDWIHDTAQDSLL

SEQ ID NO: 338 - protein, 315 aa, Homo sapiens
MESLYDLWEFYLPYLYSCISLMGCLLLLLCTPVGLSRMFTVMGQLLVKPTILEDLDEQIYIITLEEEALQRRLNGLSSSVEYNIMELEQELENVKTLKTKLDPWSSFSVLQSPVWHFAAQTPADIVSPDSHFMLSTQGMSWAQLVFLLPASRPGNSQDKRRKKASAWERNLVYPAVMVLLLIETSISVLLVACNILCLLVDETAMPKGTRGPGIGNASLSTFGFVGAALEIILIFYLMVSSVVGFYSLRFFGNFTPKKDDTTMTKIIGNCVSILVLSSALPVMSRTLGLHKLHLPNTSRDSETAKPSVNGHQKAL

SEQ ID NO: 339 - protein, 941 aa, Homo sapiens [sequence omitted]

SEQ ID NO: 340 - protein, 53 aa, Homo sapiens
MLVLMTTCILAAVCVHTAQCAPDSRMDNDCPSHQAQIHFRASEVRRGWTFNHD

SEQ ID NO: 341 - protein, 578 aa, Homo sapiens
  SITE (326): Xaa equals any of the naturally occurring L-amino acids
  SITE (342): Xaa equals any of the naturally occurring L-amino acids
  SITE (444): Xaa equals any of the naturally occurring L-amino acids
MPFRLLIPLGLLCALLPQHHGAPGPDGSAPDPAHYRERVKAMFYHAYDSYLENAFPFDELRPLTCDGHDTWGSFSLTLIDALDTLLILGNVSEFQRVVEVLQDSVDFDIDVNASVFETNIRVVGGLLSAHLLSKKAGVEVEAGWPCSGPLLRMAEEAARKLLPAFQTPTGMPYGTVNLLHGVNPGETPVTCTAGIGTFIVEFATLSSLTGDPVFEDVARVALMRLWESRSDIGLVGNHIDVLTGKWVAQDAGIGAGVDSYFEYLVKGAILLQDKKLMAMFLEYNKAIRNYTRFDDWYLWVQMYKGTVSMPVFQSLEAYWPGLQSLXGDIDNAMRTFLNYYTXWKQFGGLPEFYNIPQGYTVEKREGYPLRPELIESAMYLYRATGDPTLLELGRDAVESIEKISKVECGFATIKDLRDHKLDNRMESFFLAETVKYLYLLFDPXNFIHNNGSTFDAVITPYGECILGAGGYIFNTEAHPIDPAALHCCQRLKEEQWEVEDLMREFYSLKRSRSKFQKNTVSSGPWEPPARPGTLFSPENHDQARERKPAKQKVPLLSCPSQPFTSKLALLGQVFLDSS

SEQ ID NO: 342 - protein, 40 aa, Homo sapiens
MGPSQREVTVQWHRALFLLPLLLLSTRTETKNFGFKWLKD

SEQ ID NO: 343 - protein, 484 aa, Homo sapiens
  SITE (322): Xaa equals any of the naturally occurring L-amino acids
  SITE (345): Xaa equals any of the naturally occurring L-amino acids
  SITE (374): Xaa equals any of the naturally occurring L-amino acids
MVATVCGLLVFLSLGLVPPVRCLFALSVPTLGMEQGRRLLLSYSTATLAIAVVPNVLANVGAAGQVLRCVTEGSLESLLNTTHQLHAASRALGPTGQAGSRGLTFEAQDNGSAFYLHMLTVTQQVLEDFSGLESLARAAALGTQRVVTGLFMLGLLVESAWYLHCYLTDLRFDNIYATQQLTQRLAQAQATHLLAPPPTWLLQAAQLRLSQEELLSCLLRLGLLALLLVATAVAVATDHVAFLLAQATVDWAQKLPTVPITLTVKYDVAYTVLGFIPFLFNQLAPESPFLSVHSSYQWELRLTSARCPLLPARRPRAAAPLXAGGLQLLAGSTVLLEGYARRLRXAIAASFFTAQEARRIRHLHARLQRRHDRXQGQQLPLGDPSCVPTPRPACKPPAWIAYRLDALRTESSEGEGKELWSCRDLSCHLGPVPPPCVTLGKSLHLSEPRFLHLHNDSIFTIDVTYFPRRDVVRMEGNTGHDRPG

SEQ ID NO: 344 - protein, 242 aa, Homo sapiens
  SITE (88): Xaa equals any of the naturally occurring L-amino acids
  SITE (139): Xaa equals any of the naturally occurring L-amino acids
MEQARKSSTVSLLITVLFAVAFSVLLLSCKDHVGYIFTTDRDIINLVAQVVPIYAVSHLFEALACTSGGVLRGSGNQKVGAIVNTIGXYVVGLPIGIALMFATTLGVMGLWSGIIICTVFQAVCFLGFIIQLNWKKACXQAQVHANLKVNNVPRSGNSALPQDPLHPGCPENLEGILTNDVGKTGEPQSDQQMRQEEPLPEHPQDGAKLSRKQLVLRRGLLLLGVFLILLVGILVRFYVRIQ

SEQ ID NO: 345 - protein, 48 aa, Homo sapiens [sequence omitted]

SEQ ID NO: 346 - protein, 51 aa, Homo sapiens [sequence omitted]

SEQ ID NO: 347 - protein, 802 aa, Homo sapiens [sequence omitted]

SEQ ID NO: 348 - protein, 331 aa, Homo sapiens
MLTGIAVGALLALALVGVLILFMFRRLRQFRQAQPTPQYRFRKRDKVMFYGRKIMRKVTTLPNTLVENTALPRQRARKRTKVLSLAKRILRFKKEYPALQPKEPPPSLLEADLTEFDVKNSHLPSEVLYMLKNVRVLGHFEKPLFLELCKHIVFVQLQEGEHVFQPREPDPSICVVQDGRLEVCIQDTDGTEVVVKEVLAGDSVHSLLSILDIITGHAAPYKTVSVRAAIPSSILRLPAAAFHGVFEKYPETLVRVVQIIMVRLQRVTFLALHNYLGLTTELFNAESQAIPLVSVASVAAGKAKKQVFYGEEERLKKPPRLQESCDSDHGG

SEQ ID NO: 349 - protein, 50 aa, Homo sapiens
MYSLVLTFLVSFCALSKTFLDHWFQMFIYYILFKDSEIGFCHPLLYVLFH

SEQ ID NO: 350 - protein, 80 aa, Homo sapiens
  SITE (11): Xaa equals any of the naturally occurring L-amino acids
MTHCLLHGMGXAGAASLTPKPMSLISAYCGGLWLAAVAVMVQMAALCGAQDIQDKFSSILSRGQEAYERLLWNGEFGEPK

SEQ ID NO: 351 - protein, 250 aa, Homo sapiens
  SITE (114): Xaa equals any of the naturally occurring L-amino acids
MFLATLSFLLPFAHPFGTVSCEYMLGSPLSSLAQVNLSPFSHPKVHMDPNYCHPSTSLHLCSLAWSFTRLLHPPLSPGISQVVKDHVTKPTAMAQGRVAHLIEWKGWSKPSDSXAALESAFSSYSDLSEGEQEARFAAGVAEQFAIAEAKLRAWSSVDGEDSTDDSYDEDFAGGMDTGEGHPGLGLWWTHLIDLGILSEPHPEHSQPLQGEGEGQTQSRQAWTLQGQEGCPHSWVGNEQTEMDSFLSHRC

SEQ ID NO: 352 - protein, 309 aa, Homo sapiens
  SITE (129): Xaa equals any of the naturally occurring L-amino acids
  SITE (178): Xaa equals any of the naturally occurring L-amino acids
  SITE (187): Xaa equals any of the naturally occurring L-amino acids
  SITE (262): Xaa equals any of the naturally occurring L-amino acids
  SITE (308): Xaa equals any of the naturally occurring L-amino acids
MFTIKLLLFIVPLVISSRIDQDNSSFDSLSPEPKSRFAMLDDVKILANGLLQLGHGLKDFVHKTKGQINDIFQKLNIFDQSFYDLSLQTSEIKEEEKELRRTTYKLQVKNEEVKNMSLELNSKLESLLXEKILLQQKVKYLEEQLTNLIQNQPETPEHPEVTSLKTFVEKQDNSIKDXLQTVEDQYXQLNQQHSQIKEIENQLRRTSIQEPTEISLSSKPRAPRTTPFLQLNEIRNVKHDGIPAECTTIYNRGEHTSGMYAXRPSNSQVFHVYCDVISGSPWTLIQHRIDGSQNFNETWENYKYGFGXA

SEQ ID NO: 353 - protein, 53 aa, Homo sapiens [sequence omitted]

SEQ ID NO: 354 - protein, 129 aa, Homo sapiens
MARGSLRRLLRLLVLGLWLALLRSVAGEQAPGTAPCSRGSSWSADLDKCMDCASCRARPHSDFCLGCAAAPPAPFRLLWPILGGALSLTFVLGLLSGFLVWRRCRRREKFTTPIEETGGEGCPAVALIQ

SEQ ID NO: 355 - protein, 71 aa, Homo sapiens
  SITE (19): Xaa equals any of the naturally occurring L-amino acids
  SITE (22): Xaa equals any of the naturally occurring L-amino acids
  SITE (57): Xaa equals any of the naturally occurring L-amino acids
  SITE (70): Xaa equals any of the naturally occurring L-amino acids
MSLLLPPLALLLLLAALVXPAXAATAYRPDWNRLSGLTRARVETCGGMTAEPPKGEXRLSSRRTFHSITXW

SEQ ID NO: 356 - protein, 153 aa, Homo sapiens
MAATQTGTCLMVAALCFVLVLGSLVPCLPEFSSGSQTVKEDPLAADGVYTASQMPSRSLLFYDDGAGLWEDGRSTLLPMEPPDGWEINPGGPAEQRPRDHLQHDHLDSTHETTKYLSEAWPKDGGNGTSPDFSHSKEWFHDRDLGPNTTIKLS

SEQ ID NO: 357 - protein, 87 aa, Homo sapiens
MTAWILLPVSLSAFSITGIWTVYAMAVMNHHVCPVENWSYNESCPPDPAEQGGPKTCCTLDDVPLISGPDLPPALRAAPGAESALLG

SEQ ID NO: 358 - protein, 60 aa, Homo sapiens
MAAVMLVLTVVLGLYNSYNSCAEQADGPLGRSTCSAAPGTPGGAQDSSMSSLQSSRKPHT

SEQ ID NO: 359 - protein, 352 aa, Homo sapiens
MLCRLCWLVSYSLAVLLLGCLLFLRKAAKPAETPRPTSLSGAPPTPRHSRCPPNHTVSSASLSLPSRHRLFLTYRHCRNFSILLEPSGCSKDTFLLLAIKSQPGHVERRAAIRSTWGRWGDGLGPALKLVFLLGVAGSAPPAQLLAYESREFDDILQWDFTEDFFNLTLKELHLQRWVVAACPQAHFMLKGDDDVFVHVPNVLEFLDGWDPAQDLLVGDVIRQALPNRNTKVKYFIPPSMYRATHYPPYAGGGGYVMSRATVRRLQAIMEDAELFPIDDVFVGMCLRRLGLSPMHHAGFKTFGIRRPLDPLDPCLYRGLLLVHRLSPLEMWTMWALVTDEGLKCAAGPIPQR

SEQ ID NO: 360 - protein, 47 aa, Homo sapiens
MSLLLPPLALLLLLAALVAPATAATAYRPDWNRLSGLTRARVETCGG

SEQ ID NO: 361 - protein, 74 aa, Homo sapiens [sequence omitted]

SEQ ID NO: 362 - protein, 45 aa, Homo sapiens
MTIHALLVYACNSKCLWFSISHLHFCLVTLLILTNMTESSFSLKG

SEQ ID NO: 363 - protein, 52 aa, Homo sapiens
MSKARFPFLAFPPLVLCLEHSQASLGTRLPVVTPSSLPSSCKGIGCGFLELG

SEQ ID NO: 364 - protein, 88 aa, Homo sapiens [sequence omitted]

SEQ ID NO: 365 - protein, 131 aa, Homo sapiens
MLWTLTFFLLQRSLTSPWLFGLLFLGSSNTAVCCFLGQLIMGPKGERGFPGPPGRCLCGPTMNVNNPSYGESVYGPSSPRVPVVRLSGRSLGWLSVRTSHLILMGLCKILSVKLTFFHDSEYTLIIGNWKI

SEQ ID NO: 366 - protein, 46 aa, Homo sapiens
MLSPLNHLYFPFRFLCMLCSLPRVVFQLTPIKEAFPSQELTFPCTH

SEQ ID NO: 367 - protein, 87 aa, Homo sapiens [sequence omitted]

SEQ ID NO: 368 - protein, 34 aa, Homo sapiens
MQARWFHILGMMMFIWSSAHQYKCPCYSRQSQEK

SEQ ID NO: 369 - protein, 41 aa, Homo sapiens
MVKVGAWRAVQILMLFANPGHAEGACISPGPAGKREPLKLG

SEQ ID NO: 370 - protein, 162 aa, Homo sapiens
  SITE (66): Xaa equals any of the naturally occurring L-amino acids
MLIYWLQSSFILSAFVLINSPVTTGIQKSCCKFFPVSINLCFASLHRMKVVTLVALQWLNIALRSXLEEVQQAADGMTIKGSKVQVSFCAPGAPGRSTLAALIAAQRVMHSNQKGLLPEPNPVQIMKSLNNPAMLQVLLQAPSYVDELLNQPFLEHLTACHI

SEQ ID NO: 371 - protein, 377 aa, Homo sapiens
  SITE (164): Xaa equals any of the naturally occurring L-amino acids
  SITE (213): Xaa equals any of the naturally occurring L-amino acids
MATAMDWLPWSLLLFSLMCETSAFYVPGVAPINFHQNDPVEIKAVKLTSSRTQLPYEYYSLPFCQPSKITYKAENLGEVLRGDRIVNTPFQVLMNSEKKCEVLCSQSNKPVTLTVEQSRLVAERITEDYYVHLIADNLPVATRLELYSNRDSDDKKKESDIKWXSRWDTYLTMSDVQIHWFSIINSVVVVFFLSGILSMIIIRTLRKDIANYXKEDDIEDTMEESGWKLVHGDVFRPPPVPHDPQLPAGLRHSAVLYDPHRHLCSHAWDAVALQPGSSHDHSLLPLHVHGGVWRIFCWPSVPHFKRPSVEERSLLYGNSVPWCGFWHLLRIELLHLGKALIRSGALSHHGGSAVHVVRDLPAPRLLGLLLRLPKAAI

SEQ ID NO: 372 - protein, 84 aa, Homo sapiens [sequence omitted]

SEQ ID NO: 373 - protein, 42 aa, Homo sapiens
  SITE (9): Xaa equals any of the naturally occurring L-amino acids
  SITE (15): Xaa equals any of the naturally occurring L-amino acids
  SITE (18): Xaa equals any of the naturally occurring L-amino acids
  SITE (22): Xaa equals any of the naturally occurring L-amino acids
  SITE (28): Xaa equals any of the naturally occurring L-amino acids
  SITE (29): Xaa equals any of the naturally occurring L-amino acids
  SITE (30): Xaa equals any of the naturally occurring L-amino acids
  SITE (32): Xaa equals any of the naturally occurring L-amino acids
  SITE (40): Xaa equals any of the naturally occurring L-amino acids
MLFLVFSLXLLKPLXFFXFGGXRIVNIXXXQXQHHAEGKXGS

SEQ ID NO: 374 - protein, 82 aa, Homo sapiens
MNRSTRSYRCWATWPRLGWALPCCMNSLRKGRKFSQITTSLMASVSSASMVSRRRRPLPKHPVTTTSTATALLGTSSTWSKS

SEQ ID NO: 375 - protein, 36 aa, Homo sapiens
MVFLLLLLFGFFFDGSLRSPLLLIIHLGPAPTFLQI

SEQ ID NO: 376 - protein, 112 aa, Homo sapiens
  SITE (69): Xaa equals any of the naturally occurring L-amino acids
MPVLPGRTTALLSLTLAFAVPCSGVEAGPCVPRSHGCSSWEASVCVTSSTPGGSWRARALFPSAAWHRXAAWDSPWTQTGDFARGAMGGAGALPGGCVCISGRPRAQKLPAL

SEQ ID NO: 377 - protein, 44 aa, Homo sapiens
MLFFCLLMKMLGPSRLPFLALTLCRFILYFQFCYLISDSSPDHS

SEQ ID NO: 378 - protein, 55 aa, Homo sapiens
MSHCTWPVCLFCLVPPPMGDLKEVCLPHRCPGRTACCSYSEPHLQTEEDRRTLIC

SEQ ID NO: 379 - protein, 48 aa, Homo sapiens
  SITE (17): Xaa equals any of the naturally occurring L-amino acids
  SITE (18): Xaa equals any of the naturally occurring L-amino acids
MLPLMTYIIQYIYTYIXXVRVLAILFLRRVLSQTLLHAVYGVSCVLIF

SEQ ID NO: 380 - protein, 51 aa, Homo sapiens
MWWWLMLATTALKPIATSSSCTEALPGLWRDRHWGDWTRGSGWEVGQTWQH

SEQ ID NO: 381 - protein, 176 aa, Homo sapiens
MSRGDNCTDLLALGIPSITQAWGLWVLLGAVTLLFLISLAAHLSQWTRGRSRSHPGQGRSGESVEEVPLYGNLHYLQTGRLSQDPEPDQQDPTLGGPARAAEEVMCYTSLQLRPPQGRIPGPGTPVKYSEVVLDSEPKSQASGPEPELYASVCAQTRRARASFPDQAYANSQPAAS

SEQ ID NO: 382 - protein, 56 aa, Homo sapiens
MTFLLQWFPLGRARVVGDLCGFSTQIHPGVSRAGMADLESPPFPRTCSVPRAANKG

SEQ ID NO: 383 - protein, 42 aa, Homo sapiens
MGSWFYLFLAPLFKGLAGSLPFGCLSLLQPTEKTALQSGGSS

SEQ ID NO: 384 - protein, 47 aa, Homo sapiens
MGVLLLFSFFFPNGSFSPVVLPSYFPNSSSYFVFCTSFWRPLSFQKG

SEQ ID NO: 385 - protein, 80 aa, Homo sapiens
MKLSGMFLLLSLALFCFLTGVFSQGGQVDCGEFQDTKVYCTRESNPHCGSDGQTYGNKCAFCKAIVKSGGKISLKHPGKC

SEQ ID NO: 386 - protein, 692 aa, Homo sapiens
MGTVSSRRSWWPLPLLLLLLLLLGPAGARAQEDEDGDYEELVLALRSEEDGLAEAPEHGTTATFHRCAKDPWRLPGTYVVVLKEETHLSQSERTARRLQAQAARRGYLTKILHVFHGLLPGFLVKMSGDLLELALKLPHVDYIEEDSSVFAQSIPWNLERITPPRYRADEYQPPDGGSLVEVYLLDTSIQSDHREIEGRVMVTDFENVPEEDGTRFHRQASKCDSHGTHLAGVVSGRDAGVAKGASMRSLRVLNCQGKGTVSGTLIGLEFIRKSQLVQPVGPLVVLLPLAGGYSRVLNAACQRLARAGVVLVTAAGNFRDDACLYSPASAPEVITVGATNAQDQPVTLGTLGTNFGRCVDLFAPGEDIIGASSDCSTCFVSQSGTSQAAAHVAGIAAMMLSAEPELTLAELRQRLIHFSAKDVINEAWFPEDQRVLTPNLVAALPPSTHGAGWQLFCRTVWSAHSGPTRMATAIARCAPDEELLSCSSFSRSGKRRGERMEAQGGKLVCRAHNAFGGEGVYAIARCCLLPQANCSVHTAPPAEASMGTRVHCHQQGHVLTGCSSHWEVEDLGTHKPPVLRPRGQPNQCVGHREASIHASCCHAPGLECKVKEHGIPAPQEQVTVACEEGWTLTGCSALPGTSHVLGAYAVDNTCVVRSRDVSTTGSTSEEAVTAVAICCRSRHLAQASQELQ

SEQ ID NO: 387 - protein, 275 aa, Homo sapiens
MGNFRGHALPGTFFFIIGLWWCTKSILKYICKKQKRTCYLGSKTLFYRLEILEGITIVGMALTGMAGEQFIPGGPHLMLYDYKQGHWNQLLGWHHFTMYFFFGLLGVADILCFTISSLPVSLTKLMLSNALFVEAFIFYNHTHGREMLDIFVHQLLVLVVFLTGLVAFLEFLVRNNVLLELLRSSLILLQGSWFFQIGFVLYPPSGGPAWDLMDHENILFLTICFCWHYAVTIVIVGMNYAFITWLVKSRLKRLCSSEVGLLKNAEREQESEEEM

SEQ ID NO: 388 - protein, 70 aa, Homo sapiens
MKPKHLEWCLAHSWCVIWLSFVSPPTSHLECDGFPGSLLPPCEEGRCFPFTFHHHDCHGCSPLQSSPGQH

SEQ ID NO: 389 - protein, 222 aa, Homo sapiens
MLWLLFFLVTAIHAELCQPGAENAFKVRLSIRTALGDKAYAWDTNEEYLFKAMVAFSMRKVPNREATEISHVLLCNVTQRVSFWFVVTDPSKNHTLPAVEVQSAIRMNKNRINNAFFLNDQTLEFLKIPSTLAPPMDPSVPIWIIIFGVIFCIIIVAIALLILSGIWQRRRKNKEPSEVDDAEDKCENMITIENGIPSDPLDMKGGHINDAFMTEDERLTPL

SEQ ID NO: 390 - protein, 95 aa, Homo sapiens
MHLCICAVWVLVALLRMHGASPAQTSGTRSGNGGCRRHGAGQGRGAATQPLRPPRGTASGQLMALLSALLPRLSGSSTPMMAHGRPAPPQWSRVS

SEQ ID NO: 391 - protein, 76 aa, Homo sapiens [sequence omitted]

SEQ ID NO: 392 - protein, 69 aa, Homo sapiens
MLLSKEHTSLGWLVIFLTLASQLISYGSRTGNSRCPPCLYRTLHTVSTSHVLSSLFVSTFSGDELVWTT

SEQ ID NO: 393 - protein, 113 aa, Homo sapiens
  SITE (38): Xaa equals any of the naturally occurring L-amino acids
MRPLLLGGYWVLCLSVLGHAALYHFWLREEGKGPPQVXSVLALALPAGSCAPGLPFPGPLIPTQLLFALEWGTPTPLRDHPPHSMHSAPQNPPVFLGTHTCPPSWYFRLIPQA

SEQ ID NO: 394 - protein, 275 aa, Homo sapiens
MTITSFYAVCFYLLMLVMVEGFGGKEAVLRTLRDTPMMVHTGPCCCCCPCCPRLLLTRKKLQLLMLGPFQYAFLKITLTLVGLFLIPDGIYDPADISEGSTALWINTFLGVSTLLALWTLGIISRQARLHLGEQNMGAKFALFQVLLILTALQPSIFSVLANGGQIACSPPYSSKTRSQVMNCHLLILETFLMTVLTRMYYRRKDHKVGYETFSSPDLDLNSKPKVDGLDNERMLYSLEYKIPLLSLNLDQMGSIPPCQHKLADTFDSTDEGEQC

SEQ ID NO: 395 - protein, 38 aa, Homo sapiens
MWLSPVPGVCAAVLALSFWIAKFPGEGTAIAKALGRLK

SEQ ID NO: 396 - protein, 58 aa, Homo sapiens
MWPCCLDSLLFGFWLWAQGITLLSEDSIRIVCSSCEPEVLHVPTPVYRPCPSHSPLTF

SEQ ID NO: 397 - protein, 319 aa, Homo sapiens
  SITE (264): Xaa equals any of the naturally occurring L-amino acids
  SITE (303): Xaa equals any of the naturally occurring L-amino acids
MNTDHLRLTVPNGIGALKLREMEHYFSQGLSVQLFNDGSKGKLNHLCGADFVKSHQKPPQGMEIKSNERCCSFDGDADRIVYYYHDADGHFHLIDGDKIATLISSFLKELLVEIGESLNIGVVQTAYANGSSTRYLEEVMKVPVYCTKTGVKHLHHKAQEFDIGVYFEANGHGTALFSTAVEMKIKQSAEQLEDKKRKAAKMLENIIDLFNQAAGDAISDMLVIEAILALKGLTVQQWDALYTDLPNRQLKVQVADRRVISTTXAERQAVTPPGLQEAINDLVKKYKLSRAFVRPSGTEDVVXSICRSRLTRKCRSPCT

SEQ ID NO: 398 - protein, 278 aa, Homo sapiens
MQWLRVRESPGEATGHRVTMGTAALGPVWAALLLFLLMCEIPMVELTFDRAVASDCQRCCDSEDPLDPAHVSSASSSGRPHALPEIRPYINITILKGDKGDPGPMGLPGYMGREGPQGEPGPQGSKGDKGEMGSPGAPCQKRFFAFSVGRKTALHSGEDFQTLLFERVFVNLDGCFDMATGQFAAPLRGIYFFSLNVHSWNYKETYVHIMHNQKEAVILYAQPSERSIMQSQSVMLDLAYGDRVWVRLFKRQRENAIYSNDFDTYITFSGHLIKAEDD

SEQ ID NO: 399 - protein, 338 aa, Homo sapiens
MRKPAAGFLPSLLKVLLLPLAPAAAQDSTQASTPGSPLSPTEYERFFALLTPTWKAETTCRLRATHGCRNPTLVQLDQYENHGLVPDGAVCSNLPYASWFESFCQFTHYRCSNHVYYAKRVLCSQPVSILSPNTLKEIEASAEVSPTTMTSPISPHFTVTERQTFQPWPERLSNNVEELLQSSLSLGSQEQAPEHKQEQGVEHRQEPTQEHKQEEGQKQEEQEEEQEEEGKQEEGQGTKEGREAVSQLQTDSEPKFHSESLSSNPSSFAPRVREVESTPMIMENIQELIRSAQEIDEMNEIYDENSYWRNQNPGSLLQLPHTEPCWCCAIRSWRIPAS

SEQ ID NO: 400 - protein, 58 aa, Homo sapiens
MEPWSWFFFFFFFFPQRTCGCALCVLFLFSIWGPHGKELLNSFLYELPLCSYKGPFLS

SEQ ID NO: 401 - protein, 47 aa, Homo sapiens
MQSGRSWALKMVLLCNSCLGLGVGSVGPSMSSLFGAVLSETPGSSVY

SEQ ID NO: 402 - protein, 222 aa, Homo sapiens [sequence omitted]

SEQ ID NO: 403 - protein, 88 aa, Homo sapiens
MVAGFVFYLGVFVVCHQLSSSLNATYRSLVAREKVFWDLAATRAVFGVQSTAAAVGSAGGPCAACRQGAWPAELVLVSHHDSNGILLL

SEQ ID NO: 404 - protein, 713 aa, Homo sapiens
MLLATLLLLLLGGALAHPDRIIFPNHACEDPPAVLLEVQGTLQRPLVRDSRTSPANCTWLILGSKEQTVTIRFQKLHLACGSERLTLRSPLQPLISLCEAPPSPLQLPGGNVTITYSYAGARAPMGQGFLLSYSQDWLMCLQEEFQCLNHRCVSAVQRCDGVDACGDGSDEAGCSSDPFPGLTPRPVPSLPCNVTLEDFYGVFSSPGYTHLASVSHPQSCHWLLDPHDGRRLAVRFTALDLGFGDAVHVYDGPGPPESSRLLRSLTHFSNGKAVTVETLSGQAVVSYHTVAWSNGRGFNATYHVRGYCLPWDRPCGLGSGLGAGEGLGERCYSEAQRCDGSWDCADGTDEEDCPGCPPGHFPCGAAGTSGATACYLPADRCNYQTFCADGADERRCRHCQPGNFRCRDEKCVYETWVCDGQPDCADGSDEWDCSYVLPRKVITAAVIGSLVCGLLLVIALGCTCKLYAIRTQEYSIFAPLSRMEAEIVQQQAPPSYGQLIAQGAIPPVEDFPTENPNDNSVLGNLRSLLQILRQDMTPGGGPGARRRQRGRLMRRLVRRLRRWGLLPRTNTPARASEARSQVTPSAAPLEALDGGTGPAREGGAVGGQDGEQAPPLPIKAPLPSASTSPAPTTVPEAPGPLPSLPLEPSLLSGVVQALRGRLLPSLGPPGPTRSPPGPHTAVLALEDEDDVLLVPLAEPGVWVAEAEDEPLLT

SEQ ID NO: 405 - protein, 97 aa, Homo sapiens
MILLLSLFQGVRGSLGSPGNRENKEKKVFISLVGSRGLGCSISSGPIQKPGIFISHVKPGSLSAEVGLEIGDQIVEVNGVDFSNLDHKELQLAGSCS

SEQ ID NO: 406 - protein, 49 aa, Homo sapiens
MNVFVGPLSVAIVIFCWITMYWVSIVMGQGRGQYTWRTILSTSTPSVCS

SEQ ID NO: 407 - protein, 50 aa, Homo sapiens
MVCCGFFLLWSRVRSYMKLSGHRWSSSCPHHCYSKCGLHTSNGKSSVHTV

SEQ ID NO: 408 - protein, 406 aa, Homo sapiens
MHPAVFLSLPDLRCSLLLLVTWVFTPVTTEITSLDTENIDEILNNADVALVNFYADWCRFSQMLHPIFEEASDVIKEEFPNENQVVFARVDCDQHSDIAQRYRISKYPTLKLFRNGMMMKREYRGQRSVKALADYIRQQKSDPIQEIRDLAEITTLDRSKRNIIGYFEQKDSDNYRVFERVANILHDDCAFLSAFGDVSKPERYSGDNIIYKPPGHSAPDMVYLGAMTNFDVTYNWIQDKCVPLVREITFENGEELTEEGLPFLILFHMKEDTESLEIFQNEVARQLISEKGTINFLHADCDKFRHPLLHIQKTPADCPVIAIDSFRHMYVFGDFKDVLIPGKLKQFVFDLHSGKLHREFHHGPDPTDTAPGEQAQDVASSPPESSFQKLAPSEYRYTLLRDRDEL

SEQ ID NO: 409 - protein, 103 aa, Homo sapiens
MAFLLERSGTLLICSMWWHHGYSNITGTEGERRNLKRNKTNFRRFQDGRIGTAPVYSSQCERCRRWVISAFPTEQTAHQKIISHAWLGGSHAHGASLIASTAV

SEQ ID NO: 410 - protein, 49 aa, Homo sapiens
MAPRNQGSFSFGNFMLFLVLIERRYLPFLSPILFCCSTHNRSAVTATNL

SEQ ID NO: 411 - protein, 73 aa, Homo sapiens
MHAYACVCACMLVCVCVCVCRALVIPTEQRHRRVAHGRTSDSTLPCTVKIWPSERGDGRGERGERRRGTDWRG

SEQ ID NO: 412 - protein, 84 aa, Homo sapiens
MVWCQCLCPLCACWEEAQALWWPPLCTWPGEARGSGASLRLRPPLQNKLSPGVCLSLFLSPERNAGVPEASLQTKHPCTSYGSG

SEQ ID NO: 413 - protein, 68 aa, Homo sapiens [sequence omitted]

SEQ ID NO: 414 - protein, 30 aa, Homo sapiens
MFAFVILVFITSMWAQTISLHVSSSEEVSC

SEQ ID NO: 415 - protein, 104 aa, Homo sapiens
MPLQLSGQYWISLLVFLSLQPFPQAAIPCALTDVGGSCVICHILLNCLCILFTLTAPSLSHVLLIKMSLSVCYEPGADLSDRAATGNKKLTRSTCLLMHSNKLC

SEQ ID NO: 416 - protein, 44 aa, Homo sapiens
MTKRRKPRYRFIFALYALRLVFLFRAVTNTDASRLRAKRGECPY

SEQ ID NO: 417 - protein, 70 aa, Homo sapiens
  SITE (67): Xaa equals any of the naturally occurring L-amino acids
MVSFVGICLLLGSFFSPSLQGTIWHHPAKPDGSGHGLPSFAVIMGKQVVPTVYWRMPYPRRGGPGTXFAL

SEQ ID NO: 418 - protein, 74 aa, Homo sapiens [sequence omitted]

SEQ ID NO: 419 - protein, 57 aa, Homo sapiens
MPPHRQTDGQMGLPAPALWVWGLLLSSSFQTLLPAFPKPPALNLGCSTRPIPSFLKI

SEQ ID NO: 420 - protein, 80 aa, Homo sapiens
MALWVTCILSLCTWFSCLYGADSLANKCLSAGATRKAFPFCVLFRDLEVGLGFEGFVTHLACKLFCYCELSDSALSLGHE

SEQ ID NO: 421 - protein, 115 aa, Homo sapiens
MLALSSSFLVLSYLLTRWCGSVGFILANCFNMGIRITQSLCFIHRYYRRAPTGPWLACTYRQSCSGHLPSVVGLLLFRRYSSAVSRAGQPDWHTLLWGPSVWEQLSGQHSSQRPS

SEQ ID NO: 422 - protein, 76 aa, Homo sapiens [sequence omitted]

SEQ ID NO: 423 - protein, 104 aa, Homo sapiens
MLFCILLYTLGSARCHHLSFFLWGWSNPPEKTPLASWRGVKARLPGPGCQLLGAAGAEAGSCQAFSQQDALSTHLGFRIPLPHLQMGQMSPKPAAPFCFTLSTE

SEQ ID NO: 424 - protein, 87 aa, Homo sapiens
MMTFFGSHILLFLFCPLKAGHRHLVSSSFLTVAVSISKGPFFHSTAQKRKSRKQLPRPAFLVPLSSQNTQTRTKHHFSFLHLIVLQP

SEQ ID NO: 425 - protein, 40 aa, Homo sapiens
MVCFYALLLCFLSSVEIGPLSWLLCLSHIKCHFTALPFEA

SEQ ID NO: 426 - protein, 159 aa, Homo sapiens [sequence omitted]

SEQ ID NO: 427 - protein, 333 aa, Homo sapiens
MSPWSWFLLQTLCLLPTGAASRRGAPGTANCELKPQQSELNSFLWTIKRDPPSYFFGTIHVPYTRVWDFIPDNSKEAFLQSSIVYFELDLTDPYTISALTSCQMLPQGENLQDVLPRDIYCRLKRHLEYVKLMMPLWMTPDQRGKGLYADYLFNAIAGNWERKRPVWVMLMVNSLTEVDIKSRGVPVLDLFLAQEAERLRKQTGAVEKVEEQCHPLNGLNFSQVIFALNQTLLQQESLRAGSLQIPYTTEDLIKHYNCGDLSSVILSHDSSQVPNFINATLPPQERITAQEIDSYLRRELIYKRNERIGKRVKALLEEFPDKGFFFAFGAASQ

SEQ ID NO: 428 - protein, 226 aa, Homo sapiens
METVVIVAIGVLATIFLASFAALVLVCRQRYCRPRDLLQRYDSKPIVDLIGAMETQSEPSELELDDVVITNPHIEAILENEDWIEDASGLMSHCIAILKICHTLTEKLVAMTMGSGAKMKTSASVSDIIVVAKRISPRVDDVVKSMYPPLDPKLLDARTTALLLSVSHLVLVTRNACHLTGGLDWIDQSLSAAEEHLEVLREAALASEPDKGLPGPEGFLQEQSAI

SEQ ID NO: 429 - protein, 404 aa, Homo sapiens
MRLQDVYMLNVKGLARGVFQRVTGSAITDLYSPKRLFSLTGDDCFQVGKVAYDMGDYYHAIPWLEEAVSLFRGSYGEWKTEDEASLEDALDHLAFAYFRAGNVSCALSLSREFLLYSPDNKRMARNVLKYERLLAESPNHVVAEAVIQRPNIPHLQTRDTYEGLCQTLGSQPTLYQIPSLYCSYETNSNAYLLLQPIRKEVIHLEPYIALYHDFVSDSEAQKIRELAEPWLQRSVVASGEKQLQVEYRISKSAWLKDTVDLKLVTLNHRIAALTGLDVRPPYAEYLQVVNYGIGGHYEPHFDHATSPSSPLYRMKSGNRVATFMIYLSSVEAGGATAFIYANLSVPVVRNAALFWWNLHRSGEGDSDTLHAGCPVLVGDKWVANKWIHEYGQEFRRPCSSSPED

SEQ ID NO: 430 - protein, 73 aa, Homo sapiens
  SITE (29): Xaa equals any of the naturally occurring L-amino acids
MLVLFKFLPLTSSGRFSSVTLYHRVHHQXVFSQEAKSFSPASTLNLYICSSQFQSLQKLYCGVIPVLRYASIE

SEQ ID NO: 431 - protein, 627 aa, Homo sapiens
MEARVVHALQKRQVSLLCVFLGVSWAGAEPLRYFVAEETERGTFLANLAIDLGLGVEELSARGCRIVSDETIGFLLLNPLTGDLLLNEKLDREELCGPTEPCVLPFQLLLEKPFQIFRAELWVRDINDHSPVFLDREITLNILESTTPGATFLLESAHDSDVGINNLRNYTISSNVYFHINVHDNGEGNVYSELVLDKVLDREEVPELRLTLTGLDGGSPPRSGTTLIRILVLDINDNVPEFVESLYKVQVPENSPVGSLVVTVSARDLDTGSNGEIVYAFFYATERTLKTFRINSTSGNLHLKAELNYEAIQTYTLTIQAKDGGGLSGKCTVVVHVTDINDNPPELLMSSLTSPIPENSPETVVAVFRIRDRDSGNNAKMVCSIQDHLPFVLKPSVENFYTLVTERALDREERTEYNITITVTDLGTPRLKTQHNLTVTVSDVNDNAPTFSQTTYTLRVRENNSPALHIGSVSATDRDSGANAQVTYSLLPPHDPQLPLGSLVSINADNGQLFALRSLDFEALQAFEFRVGAADRGSPALSSQALVRVLVADANDNAPFVLYPLQNGSAPCTELVPRAAEAGYLVAKVVAVDGDSGQNAWLSYQLLKATEPGLFGVWAHNGEVRTA

SEQ ID NO: 432 - protein, 363 aa, Homo sapiens
MKTLLLLVGLLLTWENGRVLGDQMVSDTELQEMSTEGSKYINREIKNALKGVKQIKTLIEQTNEERKSLLTNLEEAKKKKEDALNDTKDSEMKLKASQGVCNDTMMALWEECKPCLKQTCMKFYARVCRSSTGLVGHQVEEFLNQSSPFYFWINGDRIDSLLENDRQQTHALDVMQDSFDRASSIMDELFQDRFFTREAQDPFHFSPFSSFQRRPFFFNIKHRFARNIMPFPGYQPLNFHDMFQPFFDMIHQAQQAMDVNLHRLPHFPMEFTEEDNQDGAVCKEIRHNSTGCLKMKDQCEKCREILSVDCSSNNPAQVQLRQELNNSLQIAEKFTKLVRRAAAVLPGEDVQHVLPAEAAGRAV

SEQ ID NO: 433 - protein, 522 aa, Homo sapiens
MAAAMPLALLVLLLLGPGGWCLAEPPRDSLREELVITPLPSGDVAATFQFRTRWDSELQREGVSHYRLFPKALGQLISKYSLRELHLSFTQGFWRTRYWGPPFLQAPSDTDHYFLRYAVLPREVVCTENLTPWKKLLPCSSKAGLSVLLKADRLFHTSYHSQAVHIRPVCRNARCTSISWELRQTLSVVFDAFITGQGKKDWSLFRMFSRTLTEPCPLASESRVYVDITTYNQDNETLEVHPPPTTTYQDVILGTRKTYAIYDLLDTAMINNSRNLNIQLKWKRPPENEAPPVPFLHAQRYVSGYGLQKGELSTLLYNTHPYRAFPVLLLDTVPWYLRLYVHTLTITSKGKENKPSYIHYQPAQDRLQPHLLEMLIQLPANSVTKVSIQFERALLKWTEYTPDPNHGFYVSPSVLSALVPSMVAAKPVDWEESPLFNSLFPVSDGSNYFVRLYTEPLLVNLPTPDFSMPYNVICLTCTVVAVCYGSFYNLLTRTFHIEEPRTGGLAKRLANLIRRARGVPPL

SEQ ID NO: 434 - protein, 453 aa, Homo sapiens
MRMASIMVWVMIIMVILVLGYGIFHCYMEYSRLRGEAGSDVSLVDLGFQTDFRVYLHLRQTWLAFMIILSILEVIIILLLIFLRKRILIAIALIKEASRAVGYVMCSLLYPLVTFFLLCLCIAYWASTAVFLSTSNEAVYKIFDDSPCPFTAKTCNPETFPSSNESRQCPNARCQFAFYGGESGYHRALLGLQIFNAFMFFWLANFVLALGQVTLAGAFASYYWALRKPDDLPAFPLFSAFGRALRYHTGSLAFGALILAIVQIIRVILEYLDQRLKAAENKFAKCLMTCLKCCFWCLEKFIKFLNRNAYIMIAIYGTNFCTSARNAFFLLMRNIIRVAVLDKVTDFLFLLGKLLIVGSVGILAFFFFTHRIRIVQDTAPPLNYYWVPILTVIVGSYLIAHGFFSVYGMCVDTLFLCFLEDLERNDGSAERPYFMSSTLKKLLNKTNKKAAES

SEQ ID NO: 435 - protein, 967 aa, Homo sapiens
  SITE (40): Xaa equals any of the naturally occurring L-amino acids
  SITE (45): Xaa equals any of the naturally occurring L-amino acids
  SITE (169): Xaa equals any of the naturally occurring L-amino acids
  SITE (293): Xaa equals any of the naturally occurring L-amino acids
  SITE (297): Xaa equals any of the naturally occurring L-amino acids
  SITE (547): Xaa equals any of the naturally occurring L-amino acids
MQRAVPEGFGRRKLGSDMGNAERAPGSRSFGPVPTLLLLXAALLXVSDALGRPSEEDEELVVPELERAPGHGTTRLRLHAFDQQLDLELRPDSSFLAPGFTLQNVGRKSGSETPLPETDLAHCFYSGTVNGDPSSAAALSLCEGVRGAFYLLGEAYFIQPLPAASERLXTAAPGEKPPAPLQFHLLRRNRQGDVGGTCGVVDDEPRPTGKAETEDEDEGTEGEDEGPQWSPQDPALQGVGQPTGTGSIRKKRFVSSHRYVETMLVADQSMAEFHGSGLKHYLLTLFSVAARLXKHPXIRNSVSLVVVKILVIHDEQKGPEVTSNAALTLRNFCNWQKQHNPPSDRDAEHYDTAILFTRQDLCGSQTCDTLGMADVGTVCDPSRSCSVIEDDGLQAAFTTAHELGHVFNMPHDDAKQCASLNGVNQDSHMMASMLSNLDHSQPWSPCSAYMITSFLDNGHGECLMDKPQNPIQLPGDLPGTSYDANRQCQFTFGEDSKHCPDAASTCSTLWCTGTSGGVLVCQTKHFPWADGTSCGEGKWCINGKCVXKTDRKHFDTPFHGSWGMWGPWGDCSRTCGGGVQYTMRECDNPVPKNGGKYCEGKRVRYRSCNLEDCPDNNGKTFREEQCEAHNEFSKASFGSGPAVEWIPKYAGVSPKDRCKLICQAKGIGYFFVLQPKVVDGTPCSPDSTSVCVQGQCVKAGCDRIIDSKKKFDKCGVCGGNGSTCKKISGSVTSAKPGYHDIITIPTGATNIEVKQRNQRGSRNNGSFLAIKAADGTYILNGDYTLSTLEQDIMYKGVVLRYSGSSAALERIRSFSPLKEPLTIQVLTVGNALRPKIKYTYFVKKKKESFNAIPTFSAWVIEEWGECSKSCELGWQRRLVECRDINGQPASECAKEVKPASTRPCADHPCPQWQLGEWSSCSKTCGKGYKKRSLKCLSHDGGVLSHESCDPLKKPKHFIDFCTMAECS

SEQ ID NO: 436 - protein, 174 aa, Homo sapiens
MYVRFFFRLHSISSHPSGIVSLCLLFETLLQTYLPQLFYHLREIGAQPLRISFKWMVRAFSGYLATDQLLLLWDRILGYNSLEILAVLAAAVFAFRAVNLMEVTSLAAAENLAAHSEQFCTAPLFPELYRVQIPVLLNSGRKKSAVYWTPISFNRTKKLRLQGRTYNDGSWNIT

SEQ ID NO: 437 - protein, 62 aa, Homo sapiens
  SITE (10): Xaa equals any of the naturally occurring L-amino acids
  SITE (25): Xaa equals any of the naturally occurring L-amino acids
  SITE (38): Xaa equals any of the naturally occurring L-amino acids
MQPAWLWLWXWELGWELVFGAILLXLQDGLFDSVLYCXHLYSGLFFPWIVNSLMSGSSQLMS

SEQ ID NO: 438 - protein, 48 aa, Homo sapiens [sequence omitted]

SEQ ID NO: 439 - protein, 174 aa, Homo sapiens [sequence omitted]

SEQ ID NO: 440 - protein, 59 aa, Homo sapiens
  SITE (37): Xaa equals any of the naturally occurring L-amino acids
MIGLTIIACFAVIVSAKRAVERHESLTSWNLAKKAKXREEAALAAQAKANDILSDKVFT

SEQ ID NO: 441 - protein, 387 aa, Homo sapiens
  SITE (228): Xaa equals any of the naturally occurring L-amino acids
  SITE (359): Xaa equals any of the naturally occurring L-amino acids
MGAFLDKPKTEKHNAHGAGNGLRYGLSSMQGWRVEMEDAHTAVVGIPHGLEDWSFFAVYDGHAGSRVANYCSTHLLEHITTNEDFRAAGKSGSALELSVENVKNGIRTGFLKIDEYMRNFSDLRNGMDRSGSTAVGVMISPKHIYFINCGDSRAVLYRNGQVCFSTQDHKPCNPREKERIQNAGGSVMIQRVNGSLAVSRALGDYDYKCVDGKGPTEQLVSPEPEVYXILRAEEDEFIILACDGIWDVMSNEELCEYVKSRLEVSDDLENVCNWVVDTCLHKGSRDNMSIVLVCFSNAPKVSDEAVKKDSELDKHLESRVEEIMEKSGEEGMPDLAHVMRILSAENIPNLPPGGGLAGXRNVIEAVYSRLNPHRESDGGAGDLEDPW

SEQ ID NO: 442 - protein, 59 aa, Homo sapiens
  SITE (15): Xaa equals any of the naturally occurring L-amino acids
MNCDVLWCVLLLVCXSLFSAVGHGLWIWRYQEKKSLFYVPKSDGSSLSPVTAAVNSFLT

SEQ ID NO: 443 - protein, 52 aa, Homo sapiens
MQRLGKAPGTWQAISKCWLLLLLSLPFSQSIIISLRAGTMSYLPLYFPQYFP

SEQ ID NO: 444 - protein, 78 aa, Homo sapiens
  SITE (7): Xaa equals any of the naturally occurring L-amino acids
  SITE (42): Xaa equals any of the naturally occurring L-amino acids
  SITE (43): Xaa equals any of the naturally occurring L-amino acids
MFGAHRXWQGSVLLFLSFAWGNGGSVTFSDVPRVMPLAGGPXXQVSSTPRPPPHQVTSSPGLESAHIVCPERKKKKKK

SEQ ID NO: 445 - protein, 53 aa, Homo sapiens
  SITE (11): Xaa equals any of the naturally occurring L-amino acids
MCKAVCKHRLXLFAVSSFSLGLGWVCVLVLMLWPVRLSLAPRPVQLQQRRSHC

SEQ ID NO: 446 - protein, 83 aa, Homo sapiens
MKKVCWVWALAHLVLCERWLTAGCLLYVGVIQPCKGSPSSVCKARRCLHPKYRIKRYGYYKYSVRLIICHHHPHALKAELTDD

SEQ ID NO: 447 - protein, 58 aa, Homo sapiens
MPFAWNDLTSLLFYLAGCFSSCRLGQGTPGSLPWTSNEEGIIQGPTPMFWNLTPFSGT

SEQ ID NO: 448 - protein, 57 aa, Homo sapiens
MVYRAFLIIILRFILIFLFKLNYSKLCPEIPFGLKFFSFVCIKVQIKKTSRKRRPYL

SEQ ID NO: 449 - protein, 63 aa, Homo sapiens
MCYFLEISLLMVFALNIKAAYGCCNINGTEVHRAKGPVSVPFPLSRPLSGTPLLDRLRPFQTL

SEQ ID NO: 450 - protein, 122 aa, Homo sapiens
MYRAIDSFPRWRSYFYFITLIFFLAWLVKNVFIAVIIETFAEIRVQFQQMWGSRSSTTSTATTQMFHEDAAGGWQLVAVDVNKPQGRAPACLQVQYNDIFKNRPAKVFEFYFIQENPQLFKL

SEQ ID NO: 451 - protein, 152 aa, Homo sapiens [sequence omitted]

SEQ ID NO: 452 - protein, 135 aa, Homo sapiens
MGLWLGMLACVFLATAAFVAYTARLDWKLAAEEAKKHSGRQQQQRAESTATRPGPEKAVLSSVATGSSPGITLTTYSRSECHVDFFRTPEEAHALSAPTSRLSVKQLVIRRGAALGAASATLMVGLTVRILATRH

SEQ ID NO: 453 - protein, 9 aa, Homo sapiens
MSLQSRGSN

SEQ ID NO: 454 - protein, 72 aa, Homo sapiens
MATILLKLPILSAMIKKPLRNYLKTSETTMEKIIIQKLVANLKFLPLGTLQLAMMIANLIKKLFFPLVKAAK

SEQ ID NO: 455 - protein, 62 aa, Homo sapiens [sequence omitted]

SEQ ID NO: 456 - protein, 606 aa, Homo sapiens
MTVVGNPRSWSCQWLPILILLLGTGHGPGVEGVTHYKAGDPVILYVNKVGPYHNPQETYHYYQLPVCCPEKIRHKSLSLGEVLDGDRMAESLYEIRFRENVEKRILCHMQLSSAQVEQLRQAIEELYYFEFVVDDLPIRGFVGYMEESGFLPHSHKIGLWTHLDFHLEFHGDRIIFANVSVRDVKPHSLDGLRPDEFLGLTHTYSVRWSETSVERRSDRRRGDDGGFFPRTLEIHWLSIINSMVLVFLLVGFVAVILMRVLRNDLARYNLDEETTSAGSGDDFDQGDNGWKIIHTDVFRFPPYRGLLCAVLGVGAQFLALGTGIIVMALLGMFNVHRHGAINSAAILLYALTCCISGYVSSHFYRQIGGERWVWNIILTTSLFSVPFFLTWSVVNSVHWANGSTQALPATTILLLLTVWLLVGFPLTVIGGIFGKNNASPFDAPCRTKNIAREIPPQPWYKSTVIHMTVGGFLPFSAISVELYYIFATVWGREQYTLYGILFFVFAILLSVGACISIALTYFQLSGEDYRWWWRSVLSVGSTGLFIFLYSVFYYARRSNMSGAVQTVEFFGYSLLTGYVFFLMLGTISFFSSLKFIRYIYVNLKMD

SEQ ID NO: 457 - protein, 295 aa, Homo sapiens
MGLPVSWAPPALWVLGCCALLLSLWALCTACRRPEDAVAPRKRARRQRARLQGSATAAEASLLRRTHLCSLSKSDTRLHELHRGPRSSRALRPASMDLLRPHWLEVSRDITGPQAAPSAFPHQELPRALPAAAATAGCAGLEATYSNVGLAALPGVSLAASPVVAEYARVQKRKGTHRSPQEPQQGKTEVTPAAQVDVLYSRVCKPKRRDPGPTTDPLDPKGQGAILALAGDLAYQTLPLRALDVDSGPLENVYESIRELGDPAGRSSTCGAGTPPASSCPSLGRGWRPLPASLP

SEQ ID NO: 458 - protein, 45 aa, Homo sapiens
MRPVCSLGWAGWPGLVCGLRALLGPSLFPVTFGATEAVHSLDVCS

SEQ ID NO: 459 - protein, 56 aa, Homo sapiens [sequence omitted]

SEQ ID NO: 460 - protein, 305 aa, Homo sapiens
MAAGLARLLLLLGLSAGGPAPAGAAKMKVVEEPNAFGVNNPFLPQASRLQAKRDPSPVSGPVHLFRLSGKCFSLVESTYKYEFCPFHNVTQHEQTFRWNAYSGILGIWHEWEIANNTFTGMWMRDGDACRSRSRQSKVELACGKSNRLAHVSEPSTCVYALTFETPLVCHPHALLVYPTLPEALQRQWDQVEQDLADELITPQGHEKLLRTLFEDAGYLKTPEENEPTQLEGGPDSLGFETLENCRKAHKELSKEIKRLKGLLTQHGIPYTRPTETSNLEHLGHETPRAKSPEQLRGDPGLRGSL

SEQ ID NO: 461 - protein, 289 aa, Homo sapiens
MFVLLYVTSFAICASGQPRGNQLKGENYSPRYICSIPGLPGPPGPPGANGSPGPHGRIGLPGRDGRDGRKGEKGEKGTAGLRGKTGPLGLAGEKGDQGETGKKGPIGPEGEKGEVGPIGPPGPKGDRGEQGDPGLPGVCRCGSIVLKSAFSVGITTSYPEERLPIIFNKVLFNEGEHYNPATGKFICAFPGIYYFSYDITLANKHLAIGLVHNGQYRIKTFDANTGNHDVASGSTVIYLQPEDEVWLEIFFTDQNGLFSDPGWADSLFSGFLLYVDTDYLDSISEDDEL

SEQ ID NO: 462 - protein, 142 aa, Homo sapiens
MCAFPWLLLLLLLQEGSQRRLWRWCGSEEVVAVLQESISLPLEIPPDEEVENIIWSSHKSLATVVPGKEGHPATIMVTNPHYQGQVSFLDPSYSLHISNLSWEDSGLLPSSSQPENIPDLYHAAVQSMCLPMAVRAPDHCEL

SEQ ID NO: 463 - protein, 75 aa, Homo sapiens [sequence omitted]

SEQ ID NO: 464 - protein, 67 aa, Homo sapiens
MKLLLLTLTVLLLLSQLTPGGTQRCWNLYGKCRYRCSKKERVYVYCINNKMCCVKPKYQPKERWWPF

SEQ ID NO: 465 - protein, 163 aa, Homo sapiens
  SITE (106): Xaa equals any of the naturally occurring L-amino acids
  SITE (113): Xaa equals any of the naturally occurring L-amino acids
MSPRGTGCSAGLLMTVGWLLLAGLQSARGTNVTAAVQDAGLAHEGEGEEETENNDSETAENYAPPETEDVSNRNVVKEVEFGMCTVTCGIGVREVILTNGCPGGEXKCVVRVXECRGPTDCGWGKPISESLESVRLACIHTSPLIVSIYVELLRQTTIHYTCK

SEQ ID NO: 466 - protein, 312 aa, Homo sapiens [sequence omitted]

SEQ ID NO: 467 - protein, 142 aa, Homo sapiens
MPRCRWLSLILLTIPLALVARKDPKKNETGVLRKLKPVNASNANVKQCLWFAMQEYNKESEDKYVFLVVKTLQAQLQVTNLLEYLIDVEIARSDCRKPLSTNEICAIQENSKLKRKLSCSFLVGALPWNGEFTVMEKKCEDA

SEQ ID NO: 468 - protein, 58 aa, Homo sapiens [sequence omitted]

SEQ ID NO: 469 - protein, 47 aa, Homo sapiens
MYLFLLCCFISEHCAQHSFPHTCPNWKTRVLSFPLHPCPHLIHPNNT

SEQ ID NO: 470 - protein, 89 aa, Homo sapiens
MVSASVFVGLVIFYIAFCLLWPLVVKGCTMIRWKINNLIASESYYTYASISGISSMPSLRHSRMGSMFSSRMTEDRAEPKEAVERQLMT

SEQ ID NO: 471 - protein, 39 aa, Homo sapiens
MAFGQEVTHLTKTSWLAPLRFIKGLLGPWGWILLILDLE

SEQ ID NO: 472 - protein, 181 aa, Homo sapiens
MMLMPYGALIIGFVCGIISTLGFVYLTPFLESRLHIQDTCGINNLHGIPGIIGGIVGAVTAASASLEVYGKEGLVHSFDFQGFNGDWTARTQGKFQIYGLLVTLAMALMGGIIVGLILRLPFWGQPSDENCFEDAVYWEMPEGNSTVYIPEDPTFKPSGPSVPSVPMVSPLPMASSVPLVP

SEQ ID NO: 473 - protein, 77 aa, Homo sapiens
  SITE (43): Xaa equals any of the naturally occurring L-amino acids
MAARSALALLLLLPVLLLPVQSRSEPETTAPTPTPIPGGNSSXSRPLPSIELHACGPYPKPGLLILLAPLALWPILL

SEQ ID NO: 474 - protein, 246 aa, Homo sapiens
MGPQHLRLVQLFCLLGAISTLPRAGALLCYEATASRFRAVAFHNWKWLLMRNMVCKLQEGCEETLVFIETGTARGVVGFKGCSSSSSYPAQISYLVSPPGVSIASYSRVCRSYLCNNLTNLEPFVKLKASTPKSITSASCSCPTCVGEHMKDCLPNFVTTNSCPLAASTCYSSTLKFQAGFLNTTFLLMGCAREHNQLLADFHHIGSIKVTEVLNILEKSQIVGAASSRQDPAWGVVLGLLFAFRD

SEQ ID NO: 475 - protein, 84 aa, Homo sapiens
  SITE (65): Xaa equals any of the naturally occurring L-amino acids
MWSSSWDHRITTPRLANFFFFFFFFFFVEMGFRYVGQAGLKLLASSNLPALASQSAGITGVSHHXWLGGLIKTPILSLTPRVSG

SEQ ID NO: 476 - protein, 110 aa, Homo sapiens
  SITE (93): Xaa equals any of the naturally occurring L-amino acids
MFLASWLLFCIVAPKDDAHLSFIQCKDIWKDNRKYSCFHFKSDQLLELASKACTSFQAQSRSFTAGAVPSEHPELPCGSQQLCCGCTARLGGXWIGASRCGSGSAFLASP

SEQ ID NO: 477 - protein, 190 aa, Homo sapiens [sequence omitted]

SEQ ID NO: 478 - protein, 61 aa, Homo sapiens
MNASLISWVLVLHRICLGLSDIPKENCIITISGMQLSHHGQSLGKWAEKLHVFYSLFSFLL

SEQ ID NO: 479 - protein, 362 aa, Homo sapiens
MRTLFNLLWLALACSPVHTTLSKSDAKKAASKTLLEKSQFSDKPVQDRGLVVTDLKAESVVLEHRSYCSAKARDRHFAGDVLGYVTPWNSHGYDVTKVFGSKFTQISPVWLQLKRRGREMFEVTGLHDVDQGWMRAVRKHAKGLHIVPRLLFEDWTYDDFRNVLDSEDEIEELSKTVVQVAKNQHFDGFVVEVWNQLLSQKRVTDQLGMFTHKEFEQLAPVLDGFSLMTYDYSTAHQPGPNAPLSWVRACVQVLDPKSKWRSKILLGLNFYGMDYATSKDAREPVVGARYIQTLKDHRPRMVWDSQASEHFFEYKKSRSGRHVVFYPTLKSLQVRLELARELGVGVSIWELGQGLDYFYDLL

SEQ ID NO: 480 - protein, 318 aa, Homo sapiens
MALMLSLVLSLLKLGSGQWQVFGPDKPVQALVGEDAAFSCFLSPKTNAEAMEVRFFRGQFSSVVHLYRDGKDQPFMQMPQYQGRTKLVKDSIAEGRISLRLENITVLDAGLYGCRISSQSYYQKAIWELQVSALGSVPLISIAGYVDRDIQLLCQSSGWFPRPTAKWKGPQGQDLSTDSRTNRDMHGLFDVEISLTVQENAGSISCSMRHAHLSREVESRVQIGDWRRKHGQAGKRKYSSSHIYDSFPSLSFMDFYILRPVGPCRAKLVMGTLKLQILGEVHFVEKPHSLLQISGGSTTLKKGPNPWSFPSPCALFPT

SEQ ID NO: 481 - protein, 102 aa, Homo sapiens [sequence omitted]

SEQ ID NO: 482 - protein, 201 aa, Homo sapiens [sequence omitted]

SEQ ID NO: 483 - protein, 102 aa, Homo sapiens
  SITE (91): Xaa equals any of the naturally occurring L-amino acids
  SITE (92): Xaa equals any of the naturally occurring L-amino acids
  SITE (93): Xaa equals any of the naturally occurring L-amino acids
MGRRSGLLGLRPGRSRWRWSGSVWVRSVLLLLGGLRASATSTPVSLGSSPPCRHHVPSDTEVINKVHLKANHVVKRDVDEHLRIKTVYDKXXXSCSLRKRIL

SEQ ID NO: 484 - protein, 42 aa, Homo sapiens
MMLGLRQKLTTSLTSAAALTCVLLLSMTGMTTSSSRSVLWKT

SEQ ID NO: 485 - protein, 151 aa, Homo sapiens
MRRLLLVTSLVVVLLWEAGAVPAPKVPIKMQVKHWPSEQDPEKAWGARVVEPPEKDDQLVVLFPVQKPKLLTTEEKPRGQGRGPILPGTKAWMETEDTLGRVLSPEPDHDSLYHPPPEEDQGEERPRLWVMPNHQVLLGPEEDQDHIYHPQ

SEQ ID NO: 486 - protein, 506 aa, Homo sapiens
  SITE (65): Xaa equals any of the naturally occurring L-amino acids
  SITE (112): Xaa equals any of the naturally occurring L-amino acids
  SITE (423): Xaa equals any of the naturally occurring L-amino acids
  SITE (425): Xaa equals any of the naturally occurring L-amino acids
MGMRRHSLMLLPWWLGAAGRKECHREQLVAAVEVTEQETKVPKKTVIIEETITTVVKSPRGQRRXPSKSPSRSPSRCSASPLRPGLLAPDLLYLPGAGQPRRPEAEPGQKPXVPTLYVTEAEAHSPALPGLSGPQPKWVEVEETIEVRVKKMGPQGVSPTTEVPRSSSGHLFTLPGATPGGDPNSNNSNNKLLAQEAWAQGTAMVGVREPLVFRVDARGSVDWAASGMGSLEEEGTMEEAGEEEGEDGDAFVTEESQDTHSLGDRDPKILTHNGRMLTLADLEDYVPGEGETFHCGGPGPGAPDDPPCEVSVIQREIGEPTVGSLCCSAWGMHWVPEALSASLGLSPVGRHHRDPRSVALRAPPSSCGRPRLGLWAVLPGRSLSAPASGVLRTVARAASPQSFPPRPSTSGQWGRRSPFTSVXGXGPSYLTQLQPGGLGGACNVGMTGSKTSALGCFLSAWQEPQDCGRRMWPWAFVLFPHGPGPSLLAPATAARPDMALPLLQSW

SEQ ID NO: 487 - protein, 615 aa, Homo sapiens [sequence omitted]

SEQ ID NO: 488 - protein, 75 aa, Homo sapiens
MGPLWGAPLRAWAAGSVGCPCCLSCASPSSISSAGDPLASCSTCGSTWEIPLTWMTMDHLLVRYYLSQARWCTTG

SEQ ID NO: 489 - protein, 187 aa, Homo sapiens
MVAATVAAAWLLLWAAACAQQEQDFYDFKAVNIRGKLVSLEKYRGSVSLVVNVASECGFTDQHYRALQQLQRDLGPHHFNVLAFPCNQFGQQEPDSNKEIESFARRTYSVSFPMFSKIAVTGTGAHPAFKYLAQTSGKEPTWNFWKYLVAPDGKVVGAWDPTVSVEEVRPQITALVRKLILLKREDL

SEQ ID NO: 490 - protein, 105 aa, Homo sapiens
MSGLAAAAHVFRVCLFPLSWGSSKTTFIHGLSSYIATPVLNSIFSSWKSRRKDTWTCLLHRLSAFPISRRRRNFALFSHSCVCIRSSSDDVGPTMYSFSVPCRVK

SEQ ID NO: 491 - protein, 211 aa, Homo sapiens [sequence omitted]

SEQ ID NO: 492 - protein, 742 aa, Homo sapiens
MAVRELCFPRQRQVLFLFLFWGVSLAGSGFGRYSVTEETEKGSFVVNLAKDLGLAEGELAARGTRVVSDDNKQYLLLDSHTGNLLTNEKLDREKLCGPKEPCMLYFQILMDDPFQIYRAELRVRDINDHAPVFQDKETVLKISENTAEGTAFRLERAQDPDGGLNGIQNYTISPNSFFHINISGGDEGMIYPELVLDKALDREEQGELSLTLTALDGGSPSRSGTSTVRIVVLDVNDNAPQFAQALYETQAPENSPIGFLIVKVWAEDVDSGVNAEVSYSFFDASENIRTTFQINPFSGEIFLRELLDYELVNSYKINIQAMDGGGLSARCRVLVEVLDTNDNPPELIVSSFSNSVAENSPETPLAVFKINDRDSGENGKMVCYIQENLPFLLKPSVENFYILITEGALDREIRAEYNITITVTDLGTPRLKTEHNITVLVSDVNNNAPAFTQTSYTLFVRENNSPALHIGSVSATDRDSGTNAQVTYSLLPPQDPHLPLASLVSINADNGHLFALRSLDYEALQAFEFRVGATDRGSPALNSEALGARAGAGRQRQLALRAVPAAERLRALHRAGAPGGRAGLPGDQGGGGGRRLGPERLAVVPAAQGHGARAVRCVGAQWGGAHRQAAERARRSQAQAGGACQGQWRASSLGHRHAARAPGGRLLPALPASPGGGPGPGPGRLAHRLPGGGVGLGVFALPPLGAPVRGGAAVQEEQGGLGGSLLGARGSFSRASGGREGR

SEQ ID NO: 493 - protein, 45 aa, Homo sapiens
MSMKCYLVVLICIPLMATDAECLFLCLRAMRISLEKGLSRSFAYF

SEQ ID NO: 494 - protein, 46 aa, Homo sapiens
MIHRARSLAALSSLMLYTKLVQPVACISHVAQDGFEYGPTQIHKLS

SEQ ID NO: 495 - protein, 41 aa, Homo sapiens
MSGAWGSGFAGALWSMGLCASSVWGNSWDIDFCPRDSHGEW

SEQ ID NO: 496 - protein, 310 aa, Homo sapiens
MALRRPPRLRLCARLPDFFLLLLFRGCLIGAVNLKSSNRTPVVQEFESVELSCIITDSQTSDPRIEWKKIQDEQTTYVFFDNKIQGDLAGRAEILGKTSLKIWNVTRRDSALYRCEVVARNDRKEIDEIVIELTVQVKPVTPVCRVPKAVPVGKMATLHCQESEGHPRPHYSWYRNDVPLPTDSRANPRFRNSSFHLNSETGTLVFTAVHKDDSGQYYCIASNDAGSARCEEQEMEVYDLNIGGIIGGVLVVLAVLALITLGICCAYRRGYFINNKQDGESYKNPGKPDGVNYIRTDEEGDFRHKSSFVI

SEQ ID NO: 497 - protein, 525 aa, Homo sapiens
  SITE (210): Xaa equals any of the naturally occurring L-amino acids
MLAFPLLLTGLISFREKRLQDVGTPAARARAFFTAPVVVFHLNILSYFAFLCLFAYVLMVDFQPVPSWCECAIYLWLFSLVCEEMRQLFYDPDECGLMKKAALYFSDFWNKLDVGAILLFVAGLTCRLIPATLYPGRVILSLDFILFCLRLMHIFTISKTLGPKIIIVKRMMKDVFFFLFLLAVWVVSFGVAKQAILIHNERRVDWLFRXAVYHSYLTIFGQIPGYIDGVNFNPEHCSPNGTDPYKPKCPESDATQQRPAFPEWLTVLLLCLYLLFTNILLLNLLIAMFNYTFQQVQEHTDQIWKFQRHDLIEEYHGRPAAPPPFILLSHLQLFIKRVVLKTPAKRHKQLKNKLEKNEEAALLSWEIYLKENYLQNRQFQQKQRPEQKIEDISNKVDAMVDLLDLDPLKRSGSMEQRLASLEEQVAQTARALHWIVRTLRASGFSSEADVPTLASQKAAEEPDAEPGGRKKTEEPGDSYHVNARHLLYPNCPVTRFPVPNEKVPWETEFLIYDPPFYTAERKDAA

SEQ ID NO: 498 - protein, 390 aa, Homo sapiens
MISLPGPLVTNLLRFLFLGLSALAPPSRAQLQLHLPANRLQAVEGGEVVLPAWYTLHGEVSSSQPWEVPFVMWFFKQKEKEDQVLSYINGVTTSKPGVSLVYSMPSRNLSLRLEGLQEKDSGPYSCSVNVQDKQGKSRGHSIKTLELNVLVPPAPPSCRLQGVPHVGANVTLSCQSPRSKPAVQYQWDRQLPSFQTFFAPALDVIRGSLSLTNLSSSMAGVYVCKAHNEVGTAQCNVTLEVSTGPGAAVVAGAVVGTLVGLGLLAGLVLLYHRRGKALEEPANDIKEDAIAPRTLPWPKSSDTISKNGTLSSVTSARALRPPHGPPRPGALTPTPSLSSQALPSPRLPTTDGAHPQPISPIPGGVSSSGLSRMGAVPVMVPAQSQAGSLV

SEQ ID NO: 499 - protein, 58 aa, Homo sapiens
MPRDASLARRACLSLLLHLSWFPPCSAPGVIFSHSGYQGFYHIGFPKPHSNSPLSGKP

SEQ ID NO: 500 - protein, 84 aa, Homo sapiens
MKGWGWLALLLGALLGTAWARRSQDLHCGACRALVDELEWEIAQVDPKKTIQMGSFRINPDGSQSVVEVTVTVPPNKVAHSGFG

SEQ ID NO: 501 - protein, 72 aa, Homo sapiens
MGSAALEILGLVLCLVGWGGLILACGLPMWQVTAFLDHNIVTAQTTWKGLWMSCVVQSTGTCSAKCTTRCWL

SEQ ID NO: 502 - protein, 178 aa, Homo sapiens
  SITE (157): Xaa equals any of the naturally occurring L-amino acids
  SITE (170): Xaa equals any of the naturally occurring L-amino acids
  SITE (171): Xaa equals any of the naturally occurring L-amino acids
  SITE (177): Xaa equals any of the naturally occurring L-amino acids
MAAPRGRAAPWTTALLLLLASQVLSPGSCADEEEVPEEWVLLHVVQGQIGAGNYSYLRLNHEGKIVLRMRSLKGDADLYVSASSLHPSFDDYELQSATCGPDAVSIPAHFRRPVGIGVYGHPSHLESEFEMKVYYDGTVEQHPFGEAAYPADGQMPXRSTLVPRKTPRKXXNLFSGXY

SEQ ID NO: 503 - protein, 8 aa, Homo sapiens
TAIFFLLV

SEQ ID NO: 504 - protein, 130 aa, Homo sapiens
  SITE (64): Xaa equals any of the naturally occurring L-amino acids
  SITE (65): Xaa equals any of the naturally occurring L-amino acids
MLMPVHFLLLLLLLLGGPRTGLPHKFYKAKPIFSCLNTALSEAEKGQWEDASLLSKRSFHYLRXXTPLRERRRRAKRKRLSPSLGPGVEPEAPGTDTCPKHSPGESHARTRPRVPTAPSSPCPSTSPPTS

SEQ ID NO: 505 - protein, 111 aa, Homo sapiens
  SITE (108): Xaa equals any of the naturally occurring L-amino acids
MRRLLLALPFALLPLAVAHAHEDHDHEHGSLGAHEHGVGRLNAVLDGQALELELDSPAMNLVGFEHVATSAADKAKVAAVRKQLENPSGPVQPAQSRSCVVSNQGINXRCS

SEQ ID NO: 506 - protein, 105 aa, Homo sapiens
  SITE (70): Xaa equals any of the naturally occurring L-amino acids
MISYIVLLSILLWPLVVYHELIQRMYTRLEPLLMQLDYSMKAEANALHHKHDKRKRQGKNAPPGGDEPLXETESESEAELAGFSPVVDVKKTALALAIYRLRAVR

SEQ ID NO: 507 - protein, 413 aa, Homo sapiens; identical to SEQ ID NO: 337

SEQ ID NO: 508 - protein, 941 aa, Homo sapiens
  SITE (807): Xaa equals any of the naturally occurring L-amino acids
  SITE (809): Xaa equals any of the naturally occurring L-amino acids
  SITE (815): Xaa equals any of the naturally occurring L-amino acids
  SITE (819): Xaa equals any of the naturally occurring L-amino acids
MVFLPLKWSLATMSFLLSSLLALLTVSTPSWCQSTEASPKRSDGTPFPWNKIRLPEYVIPVHYDLLIHANLTTLTFWGTTKVEITASQPTSTIILHSHHLQISRATLRKGAGERLSEEPLQVLEHPPQEQIALLAPEPLLVGLPYTVVIHYAGNLSETFHGFYKSTYRTKEGELRILASTQFEPTAARMAFPCFDEPAFKASFSIKIRREPRHLAISNMPLVKSVTVAEGLIEDHFDVTVKMSTYLVAFIISDFESVSKITKSGVKVSVYAVPDKMNQADYALDAAVTLLEFYEDYFSIPYPLPKQDLAAIPDFQSGAMENWGLTTYRESALLFDAEKSSASSKLGITMTVAHELAHQWFGNLVTMEWWNDLWLNEGFAKFMEFVSVSVTHPELKVGDYFFGKCFDAMEVDALNSSHPVSTPVENPAQIREMFDDVSYDKGACILNMLREYLSADAFKSGIVQYLQKHSYKNTKNEDLWDSMASICPTDGVKGMDGFCSRSQHSSSSSHWHQEGVDVKTMMNTWTLQRGFPLITITVRGRNVHMKQEHYMKGSDGAPDTGYLWHVPLTFITSKSDMVHRFLLKTKTDVLILPEEVEWIKFNVGMNGYYIVHYEDDGWDSLTGLLKGTHTAVSSNDRASLINNAFQLVSIGKLSIEKALDLSLYLKHETEIMPVFQGLNELIPMYKLMEKRDMNEVETQFKAFLIRLLRDLIDKQTWTDEGSVSERMLRSELLLLACVHNYQPCVQRAEGYFRKWKESNGNLSLPVDVTLAVFAVGAQSTEGWDFLYSKYQFSLSSTEKSQIEFALCXPXNKEKLXWLLXESFKGDKIKTQEFPQILTLIGRNPVGYPLAWQFLRKNWNKLVQKFELGSSSIAHMVMGTTNQFSTRTRLEEVKGFFSSLKENGSQLRCVQQTIETIEENIGWMDKNFDKIRVWLQSEKLERM

SEQ ID NO: 509 - protein, 264 aa, Homo sapiens
MPFRLLIPLGLLCALLPQHHGAPGPDGSAPDPAHYRERVKAMFYHAYDSYLENAFPFDELRPLTCDGHDTWGSFSLTLIDALDTLLILGNVSEFQRVVEVLQDSVDFDIDVNASVFETNIRVVGGLLSAHLLSKKAGVEVEAGWPCSGPLLRMAEEAARKLLPAFQTPTGMPYGTVNLLHGVNPGETPVTCTAGIGTFIVEFATLSSLTGDPVFEDVARVALMRLWESRSDIGLVGNHIDVLTGKGWPRTQASGLAWTPTLSTW

SEQ ID NO: 510 - protein, 55 aa, Homo sapiens
MSSDFLCFFFKLCNQMILCFFFRGAEYWFLLLVVFSFLCHSCFFFVFSVSNTICI

SEQ ID NO: 511 - protein, 214 aa, Homo sapiens
  SITE (199): Xaa equals any of the naturally occurring L-amino acids
  SITE (206): Xaa equals any of the naturally occurring L-amino acids
  SITE (214): Xaa equals any of the naturally occurring L-amino acids
MLGARAWLGRVLLLPRAGAGLAASRRCPGVWPRTWPHRSPSRGSSSRDKDRSATVSSSVPMPAGGKGSHPSSTPQRVPNRLIHEKSPYLLQHAYNPVDWYPWGQEAFDKARKENKPIFLSVGYSTCHWCHMMEEESFQNEEIGRLLSEDFVSVKVDREERPDVDKVYMTFVQATSSGGGWPMNVWLTPNLQPFVGGTIXLLKDGLXRVGSAQCX

SEQ ID NO: 512 - protein, 43 aa, Homo sapiens
MLGARAWLGRVLLLPRAGAGLAASRRSACSPTSRLNSLRSLIP

SEQ ID NO: 513 - protein, 333 aa, Homo sapiens
  SITE (100): Xaa equals any of the naturally occurring L-amino acids
  SITE (111): Xaa equals any of the naturally occurring L-amino acids
  SITE (227): Xaa equals any of the naturally occurring L-amino acids
MLTGIAVGALLALALVGVLILFMFRRLRQFRQAQPTPQYRFRKRDKVMFYGRKIMRKVTTLPNTLVENTALPRQRARKRTKVLSLAKRILRFKKEYPGLXPKDPRPSLLEXDFTEFDVKNSHLPSEVLYMLKNVRVLGHFEKPLFLELCKHIVFVQLQEGEHVFQPREPDPSICVVQDGRLEVCIQDTDGTEVVVKEVLAGDSVHSLLSILDIITGHAAPYKTVSVXAAIPSTILRLPAAAFHGVFEKYPETLVRVVQIIMVRLQRVTFLALHNYLGLTTELFNAESQAIPLVSVASVAAGKAKKQVFYGEEERLKKPPRLQESCDSDHGGGR

SEQ ID NO: 514 - protein, 415 aa, Homo sapiens
VGLVSMLGIPIPGAEGAPVLNSLVFLSGQSTPTQKGVGIAGAVCVSSKLRPRGQCRLEFSLAWDMPRIMFGAKGQVHYRRYTRFFGQDGDAAPALSHYALCRYAEWEERISAWQSPVLDDRSLPAWYKSALFNELYFLADGGTVWLEVLEDSLPEELGRNMCHLRPTLRDYGRFGYLEGQEYRMYNTYDVHFYASFALIMLWPKLELSLQYDMALATLREDLTRRRYLMSGVMAPVKRRNVIPHDIGDPDDEPWLRVNAYLIHDTADWKDLNLKFVLQVYRDYYLTGDQNFLKDMWPVCLAVMESEMKFDKDHDGLIENGGYADQTYDGWVTTGPSAYCGGLWLAAVAVMVQMAALCGAQDIQDKFSSILSRGQEAYERLLWNGRYYNYDSSSRPQSRSVMSDQCAGQWFLKACG

SEQ ID NO: 515 - protein, 112 aa, Homo sapiens
MARGSLRRLLRLLVLGLWLALLRSVAGEQAPGTAPCSRGSSWSADLDKCMDCSTSCPLPAALAHPWGRSEPDLRAGAAFWLFGLETMPQREKFTTPIEETGGEGCPAVALIQ

SEQ ID NO: 516 - protein, 155 aa, Homo sapiens
MARGSLRRLLRLLVLGLWLALLRSVAGEQAPGTAPCSRGSSWSADLDKCMDCSTSCPLPAALAHPWGRSEPDLRAGAAFWLFGLETMPQEREVHHPHRGDRRRGLPSCGADPVTMCPLPAGARPLIIHSSILEPVSASQTRREPSSSNHKGGGGR

SEQ ID NO: 517 - protein, 153 aa, Homo sapiens
  SITE (98): Xaa equals any of the naturally occurring L-amino acids
MAATQTGTCLMVAALCFVLVLGSLVPCLPEFSSGSQTVKEDPLAADGVYTASQMPSRSLLFYDDGAGLWEDGRSTLLPMEPPDGWEINPGGPAEQRPXDHLQHDHLDSTHETTKYLSEAWPKDGGNGTSPDFSHSKEWFHDRDLGPNTTIKLS

SEQ ID NO: 518 - protein, 47 aa, Homo sapiens; identical to SEQ ID NO: 360

SEQ ID NO: 519 - protein, 17 aa, Homo sapiens
MSKARFPFLLSLRWFSA

SEQ ID NO: 520 - protein, 181 aa, Homo sapiens
  SITE (110): Xaa equals any of the naturally occurring L-amino acids
MADPHVSFLSFRQLFSWAAVILLRGILGTVAPPPCPCVLDLAVYPLHLPVEAPCLEVVFKQKNGKDNCLVFYPDPIPLRGSLLGPFIKNQCHSSVIPLSDSATSKARALXLPGRETVLSVLPVFSSPTLPRTHALGDSLGVPGLLVCSETSTLNDHWCCRRAGAYIPINRRFSHLMPLAFS

SEQ ID NO: 521 - protein, 87 aa, Homo sapiens [sequence omitted]

SEQ ID NO: 522 - protein, 87 aa, Homo sapiens
  SITE (55): Xaa equals any of the naturally occurring L-amino acids
  SITE (66): Xaa equals any of the naturally occurring L-amino acids
MADPHVSFLSFRQLFSWAAVILLRGILGTVAPPPCPCVLDLAVYPLHLPVEAPCXEVVFKQKNGKXNCLVFYPDPIPLRGSLLGPFI

SEQ ID NO: 523 - protein, 66 aa, Homo sapiens
MLIYWLQSSFILSAFVLINSPVTTGIQKSCCKFFPVSINLCFASLHRMKVVTLVALQWLNIALRSS

SEQ ID NO: 524 - protein, 170 aa, Homo sapiens
MATAMDWLPWSLLLFSLMCETSAFYVPGVAPINFHQNDPVEIKAVKLTSSRTQLPYEYYSLPFCQPSKITYKAENLGEVLRGDRIVNTPFQVLMNSEKKCEVLCSQSNKPVTLTVEQSRLVAERITEDYYVHLIADNLPVATRLELYSNRDSDDKKKESDIKWASRWDTY

SEQ ID NO: 525 - protein, 151 aa, Homo sapiens
HASGARRRLQAPPVPHDPQLPAGLRHSAVLYDPHRHLCSHAWDAVALQPGSSHDHSLLPLHVHGGVWRIFCWPSVPHFKRPSVEERSLLYGNSVPWCGFWHLLRIELLHLGKALIRSGALSHHGGSAVHVVRDLPAPRLLGLLLRLPKAAI

SEQ ID NO: 526 - protein, 120 aa, Homo sapiens
  SITE (103): Xaa equals any of the naturally occurring L-amino acids
MGTVSSRRSWWPLPLLLLLLLLLGPAGARAQEDEDGDYEELVLALRSEEDGLAEAPEHGTTATFHRCAKDPWRLPGTYVVVLKEETHLSQSERTARRLQAQAXRRGYLPRSCMSSMAFFL

SEQ ID NO: 527 - protein, 269 aa, Homo sapiens
  SITE (236): Xaa equals any of the naturally occurring L-amino acids
  SITE (257): Xaa equals any of the naturally occurring L-amino acids
MGTVSSRRSWWPLPLLLLLLLLLGPAGARAQEDEDGDYEELVLALRSEEDGLAEAPEHGTTATFHRCAKDPWRLPGTYVVVLKEETHLSQSERTARRLQAQAARRGYLTKILHVFHGLLPGFLVKMSGDLLELALKLPHVDYIEEDSSVFAQSIPWNLERITPPRYRADEYQPPDGGSLVEVYLLDTSIQSDHREIEGRVMVTDFENVPEEDGTRFHRQASKCDSHGPTWQGWSAXGMPAWPRVPACAACACFPKKXPLLGGPPQKKGG

SEQ ID NO: 528 - protein, 17 aa, Homo sapiens
GWCSRRDSCWPSPPTMP

SEQ ID NO: 529 - protein, 45 aa, Homo sapiens
TWWPPCPPAPMGQVGSCFAGLCGQHTRGLHGWPQPSPAAPQMRSC

SEQ ID NO: 530 - protein, 70 aa, Homo sapiens; identical to SEQ ID NO: 388

SEQ ID NO: 531 - protein, 104 aa, Homo sapiens
MLWLLFFLVTAIHAELCQPGAENAFKVRLSIRTALGDKAYAWDTNEEYLFKAMVAFSMRKVPNREATEISHVLLCNVTQRYHSGLWLQTLQKITPFLLLRCNQP

SEQ ID NO: 532 - protein, 38 aa, Homo sapiens; identical to SEQ ID NO: 395

SEQ ID NO: 533 - protein, 42 aa, Homo sapiens
MEPAMVLKFLSSLPENLFLPSLLFFAWLCWNMVCGSPVSCPY

SEQ ID NO: 534 - protein, 215 aa, Homo sapiens
MYLSIIFLAFVSIDRCLQLTHSCKIYRIQEPGFAKMISTVVWLMVLLIMVPNMMIPIKDIKEKSNVGCMEFKKEFGRNWHLLTNFICVAIFLNFSAIILISNCLVIRQLYRNKDNENYPNVKKALINILLVTTGYIICFVPYHIVRIPYTLSQTEVITDCSTRISLFKAKEATLLLAVSNLCFDPILYYHLSKAFRSKVTETFASPKETKVRKKN

SEQ ID NO: 535 - protein, 77 aa, Homo sapiens
MLLATLLLLLLGGALAHPDRIIFPNHACEDPPAVLLEVQGTLQRPLVRDSRTSPANCTWLTKRVQQMLLFHSYGIAQ

SEQ ID NO: 536 - protein, 406 aa, Homo sapiens; identical to SEQ ID NO: 408

SEQ ID NO: 537 - protein, 103 aa, Homo sapiens
  SITE (77): Xaa equals any of the naturally occurring L-amino acids
MAFLLERSGTLLICSMWWHHGYSNITGTEGERRNLKRNKTNFRRFQDGRIGTAPVYSSQCERCRRWVISAFPTEQTXHQKIISHAWLGGSHAHGASLIASTAV

SEQ ID NO: 538 - protein, 60 aa, Homo sapiens
MRKVTISKKHALLLCFQLFRCLLSMYIWITFVLDGSCGIHCSLKPVSFPCTYHSVHSSTS

SEQ ID NO: 539 - protein, 18 aa, Homo sapiens
IPNEMAGSIWPLGYLATL

SEQ ID NO: 540 - protein, 57 aa, Homo sapiens; identical to SEQ ID NO: 419

SEQ ID NO: 541 - protein, 93 aa, Homo sapiens
  SITE (24): Xaa equals any of the naturally occurring L-amino acids
  SITE (65): Xaa equals any of the naturally occurring L-amino acids
QVSLPTRLLQMPGMGLDSRFQAWXPSPYLGPQPRAPRPGLQPGPSLRGAEFRESCPRSQKRGREXGRPCPGCRPGGWGLPARLGQPQLQTGPG

SEQ ID NO: 542 - protein, 49 aa, Homo sapiens
  SITE (41): Xaa equals any of the naturally occurring L-amino acids
MGAHSFGFQLFMSVSVLWGRLCLYGRFSVITFASPPTTFMXIQCCSHCS

SEQ ID NO: 543 - protein, 104 aa, Homo sapiens; identical to SEQ ID NO: 423

SEQ ID NO: 544 - protein, 148 aa, Homo sapiens [sequence omitted]

SEQ ID NO: 545 - protein, 72 aa, Homo sapiens
MLVLFKFLPLTSSGRFLSVTLYHRVHHQTFFAGAKSFSPASTLNLYICSSQFQSLQKLYCGVIPVLRYASIE

SEQ ID NO: 546 - protein, 112 aa, Homo sapiens
  SITE (103): Xaa equals any of the naturally occurring L-amino acids
  SITE (112): Xaa equals any of the naturally occurring L-amino acids
MKTLLLLVGLLLTWENGRVLGDQMVSDTELQEMSTEGSKYINREIKNALKGVKQIKTLIEQTNEERKSLLTNLEEAKKKKEDALNDTKDSEMKLKASPGVFNXTLDGPLGGX

SEQ ID NO: 547 - protein, 112 aa, Homo sapiens
  SITE (71): Xaa equals any of the naturally occurring L-amino acids
  SITE (103): Xaa equals any of the naturally occurring L-amino acids
  SITE (112): Xaa equals any of the naturally occurring L-amino acids
MKTLLLLVGLLLTWENGRVLGDQMVSDTELQEMSTEGSKYINREIKNALKGVKQIKTLIEQTNEERKSLLXNLEEAKKKKEDALNDTKDSEMKLKASPGVFNXTLDGPLGGX

SEQ ID NO: 548 - protein, 139 aa, Homo sapiens
MKTLLLLVGLLLTWENGRVLGDQMVSDTELQEMSTEGSKYINREIKNALKGVKQIKTLIEQTNEERKSLLTNLEEAKKKKEDALNDTKDSEMKLKASQGVCNDTMMALWEECKPCLKQTWGKGLRPSLQKQHRAGWPPG

SEQ ID NO: 549 - protein, 7 aa, Homo sapiens
LLVVLLS

SEQ ID NO: 550 - protein, 14 aa, Homo sapiens
LLLVGLQQLVVQAW

SEQ ID NO: 551 - protein, 288 aa, Homo sapiens
  SITE (10): Xaa equals any of the naturally occurring L-amino acids
  SITE (15): Xaa equals any of the naturally occurring L-amino acids
  SITE (268): Xaa equals any of the naturally occurring L-amino acids
  SITE (271): Xaa equals any of the naturally occurring L-amino acids
  SITE (273): Xaa equals any of the naturally occurring L-amino acids
  SITE (274): Xaa equals any of the naturally occurring L-amino acids
  SITE (276): Xaa equals any of the naturally occurring L-amino acids
  SITE (286): Xaa equals any of the naturally occurring L-amino acids
FSSSACPSVXSLFVXLGKNPHDAQGHPRASEDQPSSGKPVTSYPGECGFVFTKEASLEIRDMLLANKVPAAARAGAIAPCEVTVPAQNTGLGPEKTSFFQALGITTKISRGTIEILSDVQLIKTGDKVGASEATLLNMLNISPFSFGLIIQQVFDNGSIYNPEVLDITEETLHSRFLEGVRNVASVCLQIGYPTVASVPHSIINGYKRVLALSVETDYTFPLAEKVKAFLADPSAFVAAAPVAAATTAAPAAAAAPAKVEAKEESEEXDEXIXXSXISKSNNSSQXIV

SEQ ID NO: 552 - protein, 554 aa, Homo sapiens
GGGYALALLVLLLLGPGGWCLAEPPRDSLREELVITPLPSGDVAATFQFRTRWDSELQREGVSHYRLFPKALGQLISKYSLRELHLSFTQGFWRTRYWGPPFLQAPSDTDHYFLRYAVLPREVVCTENLTPWKKLLPCSSKAGLSVLLKADRLFHTSYHSQAVHIRPVCRNARCTSISWELRQTLSVVFDAFITGQGKKDWSLFRMFSRTLTEPCPLASESRVYVDITTYNQDNETLEVHPPPTTTYQDVILGTRKTYAIYDLLDTAMINNSRNLNIQLKWKRPPENEAPPVPFLHAQRYVSGYGLQKGELSTLLYNTHPYRAFPVLLLDTVPWYLRLYVHTLTITSKGKENKPSYIHYQPAQDRLQPHLLEMLIQLPANSVTKVSIQFERALLKWTEYTPDPNHGFYVSPSVLSALVPSMVAAKPVDWEESPLFNSLFPVSDGSNYFVRLYTEPLLVNLPTPDFSMPYNVICLTCTVVAVCYGSFYNLLTRTFPHRGAPHRWPGQAAGQPYPARPSVPPTLILALSSSCSCRFSLGRGAQGLFLPLALLRVGF

SEQ ID NO: 553 - protein, 453 aa, Homo sapiens
  SITE (432): Xaa equals any of the naturally occurring L-amino acids
MRMASIMVWVMIIMVILVLGYGIFHCYMEYSRLRGEAGSDVSLVDLGFQTDFRVYLHLRQTWLAFMIILSILEVIIILLLIFLRKRILIAIALIKEASRAVGYVMCSLLYPLVTFFLLCLCIAYWASTAVFLSTSNEAVYKIFDDSPCPFTAKTCNPETFPSSNESRQCPNARCQFAFYGGESGYHRALLGLQIFNAFMFFWLANFVLALGQVTLAGAFASYYWALRKPDDLPAFPLFSAFGRALRYHTGSLAFGALILAIVQIIRVILEYLDQRLKAAENKFAKCLMTCLKCCFWCLEKFIKFLNRNAYIMIAIYGTNFCTSARNAFFLLMRNIIRVAVLDKVTDFLFLLGKLLIVGSVGILAFFFFTHRIRIVQDTAPPLNYYWVPILTVIVGSYLIAHGFFSVYGMCVDTLFLCFLEDLERNDGSAERXYFMSSTLKKLLNKTNKKAAES

SEQ ID NO: 554 - protein, 96 aa, Homo sapiens
  SITE (25): Xaa equals any of the naturally occurring L-amino acids
  SITE (77): Xaa equals any of the naturally occurring L-amino acids
  SITE (79): Xaa equals any of the naturally occurring L-amino acids
AAREGAPPPCPTSAIGRASLSLRDXGRGLRDARREKRRGVRGQDGGDYGWCGPARGRGVAAKGTAEGPTGENRAQGXKXGVRVAVEASSVRGPGRA

SEQ ID NO: 555 - protein, 48 aa, Homo sapiens [sequence omitted]

SEQ ID NO: 556 - protein, 10 aa, Homo sapiens
IYQHFSLWLG

SEQ ID NO: 557 - protein, 4 aa, Homo sapiens
MFKM

SEQ ID NO: 558 - protein, 115 aa, Homo sapiens
MVPNWIQGRWDVLLCVLTVGVLPSIGSRGGWFGTQVPCLIPGALASLHRGTALQLSYPFSMAGRTAERPCSMTNHSFHLLSIYWELGTVLSVKRVLTHLLQQPGKAVLPLAPAQS

SEQ ID NO: 559 - protein, 174 aa, Homo sapiens [sequence omitted]

SEQ ID NO: 560 - protein, 228 aa, Homo sapiens
  SITE (92): Xaa equals any of the naturally occurring L-amino acids
  SITE (134): Xaa equals any of the naturally occurring L-amino acids
  SITE (170): Xaa equals any of the naturally occurring L-amino acids
  SITE (195): Xaa equals any of the naturally occurring L-amino acids
  SITE (205): Xaa equals any of the naturally occurring L-amino acids
  SITE (209): Xaa equals any of the naturally occurring L-amino acids
  SITE (214): Xaa equals any of the naturally occurring L-amino acids
MVPNWIQGRWDVLLCVLTVGVLPSIGSRGGWFGTQVPCLIPGALASLHRGTALQLSYPFSMAGRTAERPCSMTNHSFHLLSIYWELGTVLSXKRVLTHLLQQPGKAGSSVSPCSKLGDLEHRRSSAWLKAHSSXVQILCPSWHPSLGGSGVGSLQSVPGGWMTKLQPSRXPTISIAQWSQKETDHFTDQRNKGAXLLNPGASDRXKPEXRTKKXPVNSEPGETLPFTN

SEQ ID NO: 561 - protein, 84 aa, Homo sapiens
DNFLLGVAWFFRGRGSAHVGVVSRQKQWEEGTAKHAAWDYGCPQSCSFSKGVFCLFLRQGHTLSPRMECSGPILAHCNLELLGS

SEQ ID NO: 562 - protein, 69 aa, Homo sapiens
MSRKSLAFPIICSYLCFLTVATCSIACTTVFFANLRHTRYICIELSALETSGVISPQINNVPEVHGKYS

SEQ ID NO: 563 - protein, 52 aa, Homo sapiens
  SITE (36): Xaa equals any of the naturally occurring L-amino acids
  SITE (37): Xaa equals any of the naturally occurring L-amino acids
MQRLGKAPGTWQAISKCWLLLLLSLPFSQSIIISLXXGTMSYLPLYFPQYFP

SEQ ID NO: 564 - protein, 86 aa, Homo sapiens
SLKHFWSQGFWIKDTQCATCRMVVARWEERMESYCLMIQCFRLGRWKVLEMCDGYGCATMGRYLVLLNCAHLKMVKMINFVYVLKQ

SEQ ID NO: 565 - protein, 53 aa, Homo sapiens
  SITE (41): Xaa equals any of the naturally occurring L-amino acids
MCKAVCKHRLRLFAVSSFSLGLGWVCVLVLMLWPVRLSLAXRPVQLQQRRSHC

SEQ ID NO: 566 - protein, 97 aa, Homo sapiens
MYRAIDSFPRWRSYFYFITLIFFLAWLVKNVFIAVIIETFAEIRVQFQQMWGSRSSTTSTATTQMFHEDAAGGWQLVAVGCQQAPGTRPSLPPGAVQ

SEQ ID NO: 567 - protein, 121 aa, Homo sapiens
MGLWLGMLACVFLATAAFVAYTARLDWKLAAEEAKKHSGRQQQQRAESTATRPGPEKAVLSSVATGSSPGITLTTYSRSECHVDFFRTPEEAHALSAPTSRLSVKQLVIRRGAALGAASAH

SEQ ID NO: 568 - protein, 606 aa, Homo sapiens; identical to SEQ ID NO: 456

SEQ ID NO: 569 - protein, 295 aa, Homo sapiens; identical to SEQ ID NO: 457

SEQ ID NO: 570 - protein, 37 aa, Homo sapiens
MGLPVSWAPPALWVLGCCALLLSLWALCTACRSPRTL

SEQ ID NO: 571 - protein, 56 aa, Homo sapiens
  SITE (9): Xaa equals any of the naturally occurring L-amino acids
  SITE (24): Xaa equals any of the naturally occurring L-amino acids
  SITE (30): Xaa equals any of the naturally occurring L-amino acids
MRFWFLVFXFFFFPEAHVYPTSWXVSEQGXATISVTPGILNWIFVEEENNTVLDFP

SEQ ID NO: 572 - protein, 106 aa, Homo sapiens
RSRSKPRCNCEIVTIFFARFKIGPGRHRKRKIPKLCSSGSTIGRVYSLPGLLRRGSCLFGYITPDWFVLKINVIMLVSYLMVSLEHSPLILFERVGGRDCEGREKC

SEQ ID NO: 573 - protein, 279 aa, Homo sapiens
EERWKSPEVRWAPGVAMEESGYESVLCVKPDVHVYRIPPRATNRGYRAAEWQLDQPSWSGRLRITAKGQMAYIKLEDRTSGELFAQAPVDQFPGTAVESVTDSSRYFVIRIEDGNGRRAFIGIGFGDRGDAFDFNVALQDHFKWVKQQCEFAKQAQNPDQGPKLDLGFKEGQTIKLNIANMKKKEGAAGNPRVRPASTGGLSLLPPPPGGKTSTLIPPPGEQLAVGGSLVQPAVAPSSGGAPVPWPQPNPATADIWGDFTKSTGSTSSQTQPGTGWVQF

SEQ ID NO: 574 - protein, 305 aa, Homo sapiens; identical to SEQ ID NO: 460

SEQ ID NO: 575 - protein, 127 aa, Homo sapiens
  SITE (127): Xaa equals any of the naturally occurring L-amino acids
MFVLLYVTSFAICASGQPRGNQLKGENYSPRYICSIPGLPGPPGPPGANGSPGPHGRIGLPGRDGRDGRKGEKGEKGTAGLRGKTGPLGLAGEKGDQGETGKKGPIGPEGEKGEVGPIGPPGPKGDX

SEQ ID NO: 576 - protein, 142 aa, Homo sapiens
  SITE (92): Xaa equals any of the naturally occurring L-amino acids
  SITE (136): Xaa equals any of the naturally occurring L-amino acids
  SITE (138): Xaa equals any of the naturally occurring L-amino acids
MCAFPWLLLLLLLQEGSQRRLWRWCGSEEVVAVLQESISLPLEIPPDEEVENIIWSSHKSLATVVPGKEGHPATIMVTNPHYQGQVSFLDPXYSLHISNLSWEDSGLYQAQVNLRTSQISTMQQYNLCVYRWLSEXPXHCEL

SEQ ID NO: 577 - protein, 124 aa, Homo sapiens
  SITE (75): Xaa equals any of the naturally occurring L-amino acids
MSPRGTGCSAGLLMTVGWLLLAGLQSARGTNVTAAVQDAGLAHEGEGEEETENNDSETAENYAPSETEDVSNRNXVKEVEFGMCTVTCGIGVREVILTNGCPGGESKCVVRVEECPWTNRLWLG

SEQ ID NO: 578 - protein, 113 aa, Homo sapiens
  SITE (42): Xaa equals any of the naturally occurring L-amino acids
  SITE (50): Xaa equals any of the naturally occurring L-amino acids
  SITE (110): Xaa equals any of the naturally occurring L-amino acids
MPRCRWLSLILLTIPLALVARKDPKKNETGVLRKLKPVNAFXCQRGSSVXGFAMQEYNKESEDKYVFLVVKTLQAQLQVTNLLEYLIDVEIARSDCRKPLSTNEIAPFKXTPS

SEQ ID NO: 579 - protein, 39 aa, Homo sapiens; identical to SEQ ID NO: 471

SEQ ID NO: 580 - protein, 61 aa, Homo sapiens; identical to SEQ ID NO: 478

SEQ ID NO: 581 - protein, 322 aa, Homo sapiens
  SITE (28): Xaa equals any of the naturally occurring L-amino acids
RAPRRTGPASFSSRPAGTCSDNRVTSFXDLIHDQDEDEEEEEGQRFYAGGSERSGQQIVGPPRKKSPNELVDDLFKGAKEHGAVAVERVTKSPGETSKPRPFAGGGYRLGAAPEEESAYVAGEKRQHSSQDVHVVLKLWKSGFSLDNGELRSYQDPSNAQFLESIRRGEVPAELRRLAHGGQVNLDMEDHRDEDFVKPKGAFKAFTGEGQKLGSTAPQVLSTSSPAQQAENEAKASSSILIDESEPTTNIQIRLADGGRLVQKFNHSHRISDIRLFIVDARPAMAATSFILMTTFPNKELADESQTLKEANLLNAVIVQRLT

SEQ ID NO: 582 - protein, 13 aa, Homo sapiens
SCISWVFVMINGL

SEQ ID NO: 583 - protein, 362 aa, Homo sapiens
  SITE (307): Xaa equals any of the naturally occurring L-amino acids
MRTLFNLLWLALACSPVHTTLSKSDAKKAASKTLLEKSQFSDKPVQDRGLVVTDLKAESVVLEHRSYCSAKARDRHFAGDVLGYVTPWNSHGYDVTKVFGSKFTQISPVWLQLKRRGREMFEVTGLHDVDQGWMRAVRKHAKGLHIVPRLLFEDWTYDDFRNVLDSEDEIEELSKTVVQVAKNQHFDGFVVEVWNQLLSQKRVTDQLGMFTHKEFEQLAPVLDGFSLMTYDYSTAHQPGPNAPLSWVRACVQVLDPKSKWRSKILLGLNFYGMDYATSKDAREPVVGARYIQTLKDHRPRMVWDSQXSEHFFEYKKSRSGRHVVFYPTLKSLQVRLELARELGVGVSIWELGQGLDYFYDLL

SEQ ID NO: 584 - protein, 415 aa, Homo sapiens
  SITE (338): Xaa equals any of the naturally occurring L-amino acids
MRTLFNLLWLALACSPVHTTLSKSDAKKAASKTLLEKSQFSDKPVQDRGLVVTDLKAESVVLEHRSYCSAKARDRHFAGDVLGYVTPWNSHGYDVTKVFGSKFTQISPVWLQLKRRGREMFEVTGLHDVDQGWMRAVRKHAKGLHIVPRLLFEDWTYDDFRNVLDSEDEIEELSKTVVQVAKNQHFDGFVVEVWNQLLSQKRVGLIHMLTHLAEALHQARLLALLVIPPAITPGTDQLGMFTHKEFEQLAPVLDGFSLMTYDYSTAHQPGPNAPLSWVRACVQVLDPKSKWRSKILLGLNFYGMDYATSKDAREPVVGARYIQTLKDHRPRMVWDSQXSEHFFEYKKSRSGRHVVFYPTLKSLQVRLELARELGVGVSIWELARAWTTSTTCSRWALRPPRWTCSFLSHGVSEQV

SEQ ID NO: 585 - protein, 461 aa, Homo sapiens
  SITE (234): Xaa equals any of the naturally occurring L-amino acids
  SITE (236): Xaa equals any of the naturally occurring L-amino acids
MALMLSLVLSLLKLGSGQWQVFGPDKPVQALVGEDAAFSCFLSPKTNAEAMEVRFFRGQFSSVVHLYRDGKDQPFMQMPQYQGRTKLVKDSIAEGRISLRLENITVLDAGLYGCRISSQSYYQKAIWELQVSALGSVPLISITGYVDRDIQLLCQSSGWFPRPTAKWKGPQGQDLSTDSRTNRDMHGLFDVEISLTVQENAGSISCSMRHAHLSREVESRVQIGDTFFEPISWXLXTKVLGILCCGLFFGIVGLKIFFSKFQWKIQAELDWRRKHGQAELRDARKHAVEVTLDPETAHPKLCVSDLKTVTHRKAPQEVPHSEKRFTRKSVVASQSFQAGKHYWEVDGGHNKRWRVGVCRDDVDRRKEYVTLSPDHGYWVLRLNGEHLYFTLNPRFISVFPRTPPTKIGVFLDYECGTISFFNINDQSLIYTLTCRFEGLLRPYIEYPSYNEQNGTPRDKQQ

SEQ ID NO: 586 - protein, 91 aa, Homo sapiens
MLCHPHVHHHLVCLLATLTFSLNASCAEQTFHSQQSNGEFMATLPSISKQFGVIVWKPQRKDVIRLPVALSFSMGLGLLSPALGRFLASEL

SEQ ID NO: 587 - protein, 142 aa, Homo sapiens [sequence omitted]

SEQ ID NO: 588 - protein, 119 aa, Homo sapiens
MRRLLLVTSLVVVLLWEAGAVPAPKVPIKMQVKHWPSEQDPEKAWGARVVEPPEKDDQLVVLFPVQKPKLLTTEEKPRGTKAWMETEDTLGRVLSPEPDHDSLYHPPPEEDQGEERPRL

SEQ ID NO: 589 - protein, 187 aa, Homo sapiens; identical to SEQ ID NO: 489

SEQ ID NO: 590 - protein, 105 aa, Homo sapiens
  SITE (69): Xaa equals any of the naturally occurring L-amino acids
MSGLAAAAHVFRVCLFPLSWGSSKTTFIHGLSSYIATPVLNSIFSSWKSRRKDTWTCLLHRLSAFPISXRRRNFALFSHSCVCIRSSSDDVGPTMYSFSVPCRVK

SEQ ID NO: 591 - protein, 77 aa, Homo sapiens
MYASVLLTGLLSLQRCLAVTRPFLAPRCAARPWPAACCWRSGWPPCCSPSRPPSTATCGGTAYASCATRRRSTPPPT

SEQ ID NO: 592 - protein, 45 aa, Homo sapiens; identical to SEQ ID NO: 493

SEQ ID NO: 593 - protein, 136 aa, Homo sapiens
  SITE (1): Xaa equals any of the naturally occurring L-amino acids
  SITE (3): Xaa equals any of the naturally occurring L-amino acids
  SITE (8): Xaa equals any of the naturally occurring L-amino acids
  SITE (14): Xaa equals any of the naturally occurring L-amino acids
XYXSCRKXYLTYGXNSRVDPRVRHVCGVRAHGAGVPHLVSGGDEVSPGGAGPVSHSAEEQPVHQVDRLCGACPGQRVFLCPGEPGAKSGRHLSGGVPPYTECDHAQPLARPGAVESCNHEVCAQTGETVQPLMARR

SEQ ID NO: 594 - protein, 141 aa, Homo sapiens
GGERHLHRTHPRLPGHRFLRLHRAPRVPHVCGVRAHGAGVPHLVSGGDEVSPGGAGPVSHSAEEQPVHQVDRLCGACPGQRVFLCPGEPGAKSGRHLSGGVPPYTECDHAQPLARPGAVESCNHEVCAQTGETVQPLMARR

SEQ ID NO: 595 - protein, 310 aa, Homo sapiens; identical to SEQ ID NO: 496

SEQ ID NO: 596 - protein, 310 aa, Homo sapiens; identical to SEQ ID NO: 496

SEQ ID NO: 597 - protein, 59 aa, Homo sapiens
MMKDVFFFLFLLAVWVVSFGVAKQAILIHNERRVDWLFRGPSTTPTSPSSGRSRATSTV

SEQ ID NO: 598 - protein, 236 aa, Homo sapiens
  SITE (55): Xaa equals any of the naturally occurring L-amino acids
MISLPGPLVTNLLRFLFLGLSALAPPSRAQLQLHLPANRLQAVEGGEVVLPAWYXLHGEVSSSQPWEVPFVMWFFKQKEKEDQVLSYINGVTTSKPGVSLVYSMPSRNLSLRLEGLQEKDSGPYSCSVNVQDKQGKSRGHSIKTLELNVLVPPAPPSCRLQGVPHVGANVTLSCQSPRSKPAVQYQWDRQLPSFQTFFAPALDVIRGSLSLTNLSSSMAGVYVCKAHNEVGTANVM

SEQ ID NO: 599 - DNA, 5889 bp, Homo sapiens
ggttgctgtcttcctcgtccctccggcccttcttcctactcagcgtctcacttttggcctattttctgctggatctctggcagcctcgctttctccctgacgtttcaggtgagtgtttcttcattcagtaagcacccattgggtacttgcttggtgcctgattccgctgggtggggttaagtggcgaggggaacgtacagcaggccacctgcctcccaggcatggcccacttcctttttgtacggaattccctaaaatgagaattgcccctttcccaaactaatactactgtaggtgcagtggttaagatggtgaagtctgcagccatattacctgggttccattctctgttctgccatttaccattgctgtgaccttgtaaaagtagctcaatttctgtttgtctcaatttccttatctgtaaaacacagatgatagaacttacttcatagagaggtgaggagaggattaatgagttaatacacatgctatacttatgatagtgtttcacatataagccttataaatagaacgtcagtgtgtgtttttcttgttatccatataatttacttagtaggtgacaggctgtatgtgagttgcttgggagataagcatgagtaaaatctagttcttatgttggagaagggtaatgtctaaaggagacagacgcaaacaaaaacatgtaacagctcccccattggcatctgaagaaggtgctctggggctgcagaggagggacaactatttctgccttggggagtgtctccagggcccctaccactcaataatttgcccccctcctctctctctagcatcatccccagagagccacactctgacaggtgagtacaggccacctcttgaagacaaatgcccacatcctgtcctgcttgctggtgccagtgtcaccatggagcagggcagtgccccagcattgtgaatgaactggtaacaagccatgggtttttcatggtcctaggctcctgtgtaggtgtttgcgtgcctgctccttttggggcagagggttgggtcctcctggctttgcttctaagaccaggacagcctccttttgagaggtggggtcatttgcttttttagactaaagatatctttggcattctcagagggatttaagtgtctaggaagctggtatctgaggcctccaggggtcatgtcatgtctccccagtgagggtgcggggtcaggcgcccggccgcacctgctgagtgtgcccgagttgtgcagatacctggctgagagctggctcaccttccagattcacctgcaggagctgctgcagtacaagaggcagaatccagctcaggtaacctcccctacatcatacaacagttcactacactgaaggggaatagaggtggcgggggatgggagtggagtgatataaactccccgcttggagaccctgaaagaagaggcctgggcgccttcttgaggcaacattcacagctaatccctggtgcaggaggcagtctcacctcaggaaataagcttttgatagcctgacactttctcctgccaaggcagaccagtgtgaattacaggtggtgggcattatgtattgccagcttcctgaattggtggtcttgagcatcctcttaaccaaactggaccaccccattccttgagtacatacccatccttctaccagctgagcagtagtttcttacccagccgagcggggcgcatatctcagcgtgatgttcttagacttttgctcttctctgcagttctgcgttcgagtctgctctggctgtgctgtgttggctgtgttgggacactatgttccagggattatgatttcctacattgtctgtgagtagggtctgtccctgccctatttaaagccctctcctttcttctttccttggactgacccagagggaagactatgctctctctgctcagtttctgatttgtggagatctccagggatgctttagtattagtaactgtggaagacttacctggggaggagggcagtggatgtggcaagaagaggttggcacagccttgggaaaggaccttgcctaccttcagcacttcagtttagggaccagttgaatgggggctcttaggaaattggcgtagggagctcttagttcacgttcttaacccatagtgttgagtatcctgctgtggcccctggtggtttatcatgagctgatccagaggatgtacactcgcctggagcccctgctcatgcagctggactacagcatgaaggcagaagccaatgccctgcatcacaaacacgacaagaggagtaaggggctgccctaagccaggagggtgaaagagcgggagggccttggcttggggttcatgagatgccctggaattgagatcttctccagttctttagctgtgtttgtctcccctcccatcattcatgcttggtcattgctctactactcttgcttttctagagcgtcaggggaagaatgcacccccaggaggtgatgagccactggcagagacagagagtgaaagcgaggcagagctggctggcttctccccagtggtgaggtccagggaaagcgggggtgtcaaatagaaagccagaggaaaaatctttctgctttggagctgccacctccaaaggaggtggaagccagaggttttgggagaggggatgctcctgataaattggttctcttatcccctcacatgtcgtgttcatcctggttctcctgccaggtggatgtgaagaaaacagcattggccttggccattacagactcagagctgtcagatgaggaggcttctatcttggagagtggtggcttctccgtatcccgggccacaactccgcagctgactgatgtctccgagggtatggggagccctttgctgccctgctccccgccacaatctttgtgttccctaccatgggtacttactgtgctctctggcccactcactctctaattctctcagctcctaaaagaccttaacacctaaggcttggcccagctttccatgtcttgagttctcatccttgaactcattgtctgttgtggctaatcagaccagcagcaggcccattcttaattctttgttctctgcacagatttggaccagcagagcctgccaagtgaaccagaggagaccctaagccgggacctaggggagggagaggagggagagctggcccctcccgaagacctactaggccgtcctcaagctctgtcaaggcaagccctggactcggaggaagaggaagaggatgtggcagctaaggaaaccttgttgcggctctcatcccccctccactttgtgaacacgcacttcaatggggcagggtccccccagatggagtgaaatgctcccctggaggaccagtggagacactgagccccgagacagtgagtggtggcctcactgctctgcccggcaccctgtcacctccactttgccttgttggaagtgacccagccccctccccttccattctcccacctgttccccaggactcaccccagcccctgcctgcccctgaggaagaagaggcactcaccactgaggactttgagttgctggatcagggggagctggagcagctgaatgcagagctgggcttggagccagagacaccgccaaaaccccctgatgctccacccctggggcccgacatccattctctggtacagtcagaccaagaagctcaggccgtggcagagccatgagccagccgttgaggaaggagctgcaggcacagtagggcttcctggctaggagtgttgctgtttcctcctttgcctaccactctggggtggggcagtgtgtggggaagctggctgtcggatggtagctattccaccctctgcctgcctgcctgcctgctgtcctgggcatggtgcagtacctgtgcctaggattggttttaaatttgtaaataattttccatttgggttagtggatgtgaacagggctagggaagtccttcccacagcctgcgcttgcctccctgcctcatctctattctcattccactatgccccaagccctggtggtctggccctttctttttcctcctatcctcagggacctgtgctgctctgccctcatgtcccacttggttgtttagttgaggcactttataatttttctcttgtcttgtgttcctttctgctttatttccctgctgtgtcctgtccttagcagctcaaccccatcctttgccagctcctcctatcccgtgggcactggccaagctttagggaggctcctggtctgggaagtaaagagtaaacctggggcagtgggtcaggccagtagttacactcttaggtcactgtagtctgtgtaaccttcactgcatccttgccccattcagcccggcctttcatgatgcaggagagcagggatcccgcagtacatggcgccagcactggagttggtgagcatgtgctctctcttgagattaggagcttccttactgctcctctgggtgatccaagtgtagtgggaccccctactagggtcaggaagtggacactaacatctgtgcaggtgttgacttgaaaaataaagtgttgattggctagaactgctgcctccctgactgtgagctgccttccacaccctgcactgcactgtgttctctcctcacccttaacctgcttcactccagtctgttctggctgtttattaccttgttgcaaaacagggccgaagcaaggattaccttgacaaccctagcttctccttagccatcttccttgacagtgtgatctgtttagtgagatttagcatgtgtgaataaagtatatgcaggaggaaattgctttgtcttcccaatcggtagaaattcgggaccataaaaattgtgttttaccatgtggcctacaaccttaacactgctttcttaagaagtcttcacccatctacatgctaacaactcactcagcctggatttatctttactggggaagccaaacaagcaatagaggacctttacctgtgttagaaatgagttggagccaaggaacactgaagaaatagtatcttaacagttactgagtccattgtatgtgcttggctctgctctgagtgatttatatgtattaagatttttcctcacaggtcagatatatactgttactaacttcattttatagacaggttaagcttcctgaaggccacaggtcccagtaaattgtggagccagaacccaaacccaagaagttttggcttcagcaaatgcatcagacagcccctgtccattaatagggcacaggtaggaagatgcacaaggatgtgggaactatagagaaccaatctgatgccttggcttaacaaagagtggacatggcaagccttcctctttggggaagaaaagcccagaactgagcagatggcctcctttatgagttcatgtcctccgccttcagctggaggtaccatatggcgatgctacctgtctttctgctggaggtaccatatggtaatgctgcctggctgtctgctggaggtaccatatggtaatgctgcctgtctttctgaggttgacttttatgccatgtctttcctaagtgtgtaagaatttttctgtttgcttcacatttgactgagaatcattctagggtttgattgagcccctgtcctgtgccactaaaggaactcgaacttttcatcacttagagatttcagaggggaatggaaaaacagttctaatcaataagcaagcaattcaagaaaaatagaattaatcaggcaatgactgcaacatgtcctatctttaatctattttcttattaagcttggacattgacaatagaaccagaagcttgtagctggatcaaaatattctccataggcctggagtttcatgagggtctattcttttgttgttgttgttttggtttt

SEQ ID NO: 600 - DNA, 191 bp, Homo sapiens
gggccggggatggcgctgagcctgggcctgggtctgggtctgagcctaggcatgagtgaggccaccagtgaggcagaggaggagaggccacggccgagcggtgggacgcctggccacgacgctgtggctgcgctccgcggctgggaggcggtgctggcggcggcgcagcggttgctggtgtgggagaagcc

SEQ ID NO: 601 - DNA, 686 bp, Homo sapiens
gggtttttttttttttttttttgagacggagtcttgttctgttgcccaggctggagtgcaatggtgcagtcttggttcactgcaacctctgcctcccaggttcaaacaattctcctgcctcagccgtccaagtagctgggattacaggtgcatgccacgatgcctggctattttttgtatttttagtagaggtggggtttcaccatgttggccaggctggtctcgaactcctgacctcaggtgattcacccacctcggcctcccaaagtgctgggattacaggtgtgagccacggcgcccagcctcatgagggtctattctttacattcaccatggtctgatggttgctacatgtttgtctatgattttttttttctattatcaggtgtcttggccggttcatgccccacgatgaaagggccagaggttttcatatgagtaaaagaaaaaagcagaaatgtgaaacctacaattaggctaaacaaaaatcaactggaaaagtacaggctgaggggagaagagttggctacatgtttatgttaggggaggagggagtacattttagctatgtattcaaacagctaatagtttaatgttgctgcttataaacttaattttaggctgcattaataaaagtgtagtctccaaaacaagaaatgtgataattctagtgtcctgtgcacgaa

SEQ ID NO: 602 - DNA, 8680 bp, Homo sapiens
cctcagcggccgggcccacggccccgagcagccatgctgggcgcgcgggcctggttgggccgcgtccttctgctgccccgcgccggtgcaggcctcgccgcgagccgcaggtacgggcgggcgagcgggcccctagggcactccctgcgcctgcctgcgggcccagtggagggtcttccggacaccggtccccagtgccagtctggaccacccctgcatgcctggcccttcccccacccccacctccggtctgctcctgagacctggctctggctgtaaggccctcctcccctcctctcccgtcctcatcccttccctcctctccccttccttccagtgcagtgccagctcctcagggactgttctgacactgcttccaggaagccttccttgcaccccagtgctggatgctgggtcaagggcctttctccaatagtaccctgtgccctgtcacagtcctttattgctgcatggacctttcgttatttaggtctgcctgcagtcccacttccaggctgaactccctgaggtctctgattccctaggtgtcctggagtctggcccaggacctggccccacaggagtcccagcaggtgggcgctgagtgagggagtccccatgtctggtttcctctgtttgtccctcacctggtcgagtcccagaccctactgatcttggcctgtccagccaccaacagtaggctgccttccagtggggccacacccaggcctgccagagagatgcctccaagcagctgctccaggaagggccgggggaggggcctggggaggggtaagaatggagccccaagaaccattctgcccattgtgacccgccctgacctcacagccatccttcccaccgccaggcccaggaggttgggggagactaacctggcaaggagcccccaatgagccacctctcctcaccccccaaaaaacataagggggagcacaaaggccacagtctcccccatggttcagaaaggtgggttgggctgggagcaggggtcctactggggtgctgagtgaaatggagcaggtgctggggggcctgggagaaggtgggtggaggcccctggcttgcctgatgcaccagtcctcgccaggggtagctcctcccgggacaaggaccgaagtgcgacggtcagtagttcagtgcccatgcctgctggagggaaaggaagccatccttcatctacaccccagagggtccccaaccgcctgatccacgagaagtcaccatacctcctacaacatgcctacaatcctgtggactggtgagcacctctcctggggccctgcctggaatcgctggggtcctgggcccctcccagaccccctgggctactgagtgatgccccaccctgctgggtctaggtacccctggggacaggaagccttcgacaaggccaggaaggaaaacaagccgattttcctctcaggtaatgctcccaccttccctgatgtgggggtgtgggcagggagtggcagtggatgggggagggtcctctcggcctggcgggtcttccaggagactagaggccaggacgtcttccatgtagccagggccacttggccagcctccctctgacccgttgctggccccctgacctctccccatggccctgttcagtcgggtactccacctgccactggtgccacatgatggaagaggagtccttccagaatgaggagattggccgcctgctcagtgaggactttgtgagtgtgaaggtagaccgtgaggagcggcctgacgtggacaaggtgtacatgacgttcgtgcaggtgagcagccctcctcgggagtgtatgcgccacatgggctcagagcagctcccctcaccctcgccctctctccgccaggccaccagcagcggcgggggctggcccatgaatgtgtggctgactcccaacctccagccctttgtcgggggcacctatttccctcctgaggatggcttgacccgagtcggcttccgcacagtgttgctgagaatacgagaacaggtgggtgtgcctccgggagttgggggaccagggtgggggactaggaaacaagagcccctccccctagctgacctccaggtgtgcccccacctcccgcagtggaaacagaacaagaacaccctgctagaaaatagccagcgtgtcaccactgccctgctggcccgatcagagatcagcgtgggtgaccgccagctgccgccctctgccgccaccgtgaacaatcgctgcttccagcagctggatgagggctatgatgaggaatacggtggcttcgctgaggcccccaagtttcccacgccgggtcagtgccccacgcccgccttagcccaggctttggccttctgattcctatgctggtcagggacctactggctcctggcctcacccatagcttcctgtcctcctgactggcagtgacctccttgcccctagcctgtcggtagctatcggtgaagacccgactgctggtgtcagcagtgaccctctcaccttaacctagatgatgaccttctgtcccctgacttggtcagttacccagtgaccctgacttggctaatgacattctgggctctagggggacaagtaacttactggtcctctgtgaaccaatgatattctgacctctggcttaggctattaccttctgtcctgtgggttgactcttgacctcacagcctgtccagagactgcctgttgagtgaactcccagcctctgcctggcccaaggcctcctgaccaccccgatctctgtccccactttcccattctctcacctgcatgttcttggtgcccccacagtgatcctgagcttcctgttctcctactggctcagccatcgactgactcaggatggctctcgggcccagcagatggccttgcataccctgaaaatgatggctaacgggggcatccgggaccatgtggggcaggtgacgggcactgggtgttccctggaggggcagcagggggctgtggggtggggcagaagctgggactggcctccagctttgtatccgcacagggctttcaccgctactccacagaccgccagtggcacgtccctcactttgagaagatgctctatgaccaggcacagctcgctgtggcctattcgcaggccttccaggtgacccctgaccccagcccagagaacaggcatctcactctggctgcccctcccaaggccttcctggtgactgtggcttctcttaatctgaatcccctgttccctcccatgtacccactacccaggcttccctcccccgcctgcctcagagaatgttgccaccttccacctgggcctccccagtgacctctctgttcacagtctcctttcttccctttcttagctctctggtgatgaattctactctgacgtggccaaaggcatcctgcagtacgtggctcggagcctgagccaccgggtgtgtgtccatggtggcaggcaggcctggctgtgggaggggttggggcctccactgccctgtgggccggggccagccaactctcccctccccacagtccggaggcttctatagcgcagaagatgcagactcgcccccagagcggggccagcggcccaaagagggcgcctactatgtgtggacggtcaaagaggttcagcagctcctcccggagcctgtgttgggtgccaccgagccgctgacctcaggccagctcctcatgaagcactacggcctcacagaggctggtaacatcagccccagtcaggtgaggacttctggggtcacctgacgggccctggtgcctgccaggcgtgtgagctcgcagacaaaggccattctcctcaggaccccaagggggagctgcagggccagaatgtgctgaccgtccggtactcgctggagctgactgctgcccgctttggcttggatgtggaggccgtgcggaccttgctcaattcagggctggagaagctcttccaggcccggaagcatcggcccaagccgcacctggacagcaagatgctggctgcctggaatggtggggcagcacacctgagaccgagcctgtctgtaggatcccccttcacaaagcccctgtctttccggcagcggctaaatgctcactctcccttgattagcgttattattctcagttgacaaaagaggcttaaggagcttgagtaacccgcccaaggtcacgcgcaagggctgggaaccccgccatgtctggctttggagcccaagatcttagggatcacccatggctccagggaggtgttggggcctaaggtgatagggtggacatgcctggagggtcctggccagcttcttaccactacttgtctctcctggctccaggcttgatggtgtcaggctatgctgtgactggggctgtcctgggccaagacaggctgatcaactatgccaccaatggtgccaagttcctgaagcggcacatgtttgatgtggccagtggccgcctgatgcggacctgctacaccggccctggggggactgtggagcacaggttgggggctgggtagaccgggagggcccgtctccccaacgcgtccccagcctacctctgccctacttctcccctccatgtggactccagtcctggctctgccaggtgcttgctgtgagtttgtagcttccctgggcccatttactcatctgggaagtgggctgatggcacctgcccaagagggttcatctggagggttaagtgaacaaatgcgtgaaagggcctcctctgggaaaggccctctctcctggggctctccccagcccctcccgtaatgcctgtcccccagcaacccaccctgctggggcttcctggaggactacgccttcgtggtgcggggcctgctggacctgtatgaggcctcacaggagagtgcgtggctcgagtgggctctgcggctgcaggacacacaggacaagctcttttgggactcccagggtggcggctacttctgcagtgaggctgagctgggggctggcctgcccctgcgtctgaaggacggtcagtgggggtgcagggctagtctggggtcctgggaggtgtaagtgcagcgtgggtgaagagctggtgtgggcaggagccctcctggctttgtgtctctgctacttattaatggcgtgatttttggctgctgtaatatttctgtgtctcaatttcttttttttaaatagagacagagtcttgctatgttgcccaggctgatcttgaaatcctgggctcaagtgatcctcccacctcggcctcccaaagtgctgggattacaggcatgaaccactacactcagcgtgttttgtttcgttcctttcttttctttttatttcctttctctttctttctttctctttcctttcttcctttctttcttttctttctctctttctttctcttttttttttttttttgagacagggtctcactgtcacccaggctggaatgcagtggcatgatcttggctcacagcaacctctgcctccggggctgaatcaattctcccacctcagcctcctgagtagctaggactataggcatgcaccaccatgcctggctaattttttgtagagatgggatttctccatgttgcccaggctggtctgaaactactgggctcaagtgatctgcccacctcggcctcccaaagtgctgggattacaggcgagagccaccatgcctggcctgtttcttaataagtaaaatggagctaacattggtactaccttacagggttgatgtaaagatgaatgtagctgttctgtaaacatgcttagcacagtaactgacacccatggattcagatattgaccaaggctcacttggtctctgccctcatgaagcttacagtatggtaggggagacagcgaaaatgcagtaatgatgcaaaaacacatgcacaaatgtgcagttaaaattgtggtgagtgccatgaagaagtaggacgctctatgtgtgcctgctccctatcacccatgtgccttgtctgtggttaaaggtttctttcccaaaactcaaattttagctcctcaaagatcaggactttctgccactgttgtatccccagggtctagtgtggttctggcacattgtaagtgcttaataaatgttaactgagtgaatgaaagggccttgggagagaaccacagaggaggaccaactcagcctagggagagattagaggacacctgtgacaggtgtcatttaaccaaggcctggagggaaagaggggccatgtggccatggagaagctgtggagagagttcaggcatagggagcagtgcatgacaggcctggtgcaggcagcctgtatcctggaggacaggcagggcccgcgtgttccaggagggcaccgaggagaatgctgaggccggcagggcacggaagccgtcttttttttttttttttcctaagaaaagaaggctggtctcaaactcctgggctcaggtgatcctcccgcctcggcttcccaggtgctgggactacaggtgtgagccaccatgcccggctggcaaggaggttttaagtggattgtgatctgctctggtatggttttaaggaggtcactctgaccactgatggagagaagtgggggtgggggaaacaggcgaccagttaggaggccattactcgtgttcagtccaggcaggcattggtgaaggctcagaggatgtggaagtatgagatggggagacatggtgagatttggatctcttctggccacagccctggcaagactcacagatggattagaagcggagggagagggagaggaaggggacaggatgatgccgctctagcttgagcagctgagtggctggacagaggcatcagcagcgaggagggagcctggagaccaacagttgaggctaggacaggtagagtggagggtgccataaaaaagacagcaaagtactgataactgctggagtggcatccacacccagagcggggaaggggcaggatgggcagggccttttctctgtcccgtcccccaagtggccctggatacagtcctgggcagggtcctgggactcagtgacctgcccttacccccaccccctgcctccctatgtgctgtagaccaggatggagcagagcccagcgccaattccgtgtcagcccacaacctgctccggctgcatggcttcacgggccacaaggactggatggacaagtgtgtgtgcctattgaccgccttttccgagcgcatgcgtcgtgtcccggtggcgttgcccgagatggtccgcgccctctcagcccagcagcagaccctcaagcaggtggggggtgagggcatctgggctgggacctcgggtaggagggaagttggggctgcgatggcagatgggaacagggggtggggttcctgggctgtccccagagctcaggtctgtgtgtgtgcaggcacgtggcctgtcagacagggaggcagaagttaatatgagtccgtggtggctgatgaagtgtttctctgtacgtcttggtgtcagtgtaattgcttctgtccatactgtgttactggtgtgtgtgtacttccgggtgtgtgtgaccctggaggtgtgtgtctgtgcacctacctttgagggggatgctggtgtgagtgtttgtctgtctgcatgtggatgccccatctgcaggtttgcctctgtgtctgcctgcatgcgtgtgtgtctggtgtttgtgtgtgtggtatctgcctctgtgtgggcatctactgtgtgtgtgtgtgtgtgtgtgtgtgtgtgtgtgtgtgtgtgtgtgactactctgtgtctgtctgaatgggtctctgtgtgctctgggtcttctgggtgtgtgtctccccatgtttgtatctgtaccattgtgtatatgtatgacatttccacttcggtattctcatgtgtgagtgtgtgtgtgtgttcccacttgccaagcattaactcatcctggcagctgagatgagtccctgttccttcttagagatatacggtggggcggaaggaggatggggaagccctggtggtctagggctcagccctccctcccctgacacaccggagtgacctttctattccggtcagatcgtgatctgtggagaccgtcaggccaaggacaccaaggccctggtgcagtgcgtccactctgtctacattcctaacaaggtacccatccctgtgagcccaatctgccacctccccagagctgccccctcccatcctcagctcctcaacatctccttcccctcagaatgttgggaagagggaacttcccagtgggcctttctaatgggcaggtgaccccaccccggcaggtgactctccctgctctgctgctgccctaggtgctgattctggctgatggggacccctcgagcttcctgtcccgccagctgcctttcctgagtaccctccgacggttggaagaccaggccactgcatatgtgtgtgagaatcaagcctgctcagtgcccatcactgatccctgcgaattacgaaaactactacatccatgactgccccaacccccttggggtggggcagaaggtgaagcatcccaactgactagagactcaggccctgcagggccctatagaacctgtggccatccctgagcaccctgccaccaggtgacctcggccatactcactgccccccttgggcacccactcaccctagaataaacttaacagtgtcccgtggtaa

SEQ ID NO: 603 - DNA, 8677 bp, Homo sapiens
cctcagcggccgggcccacggccccgagcagccatgctgggcgcgcgggcctggttgggccgcgtccttctgctgccccgcgccggtgcaggcctcgccgcgagccgcaggtacgggcgggcgagcgggcccctagggcactccctgcgcctgcctgcgggcccagtggagggtcttccggacaccggtccccagtgccagtctggaccacccctgcatgcctggcccttcccccaccccacctccggtctgctcctgagacctggctctggctgtaaggccctcctcccctcctctcccgtcctcatcccttccctcctctccccttccttccagtgcagtgccagctcctcagggactgttctgacactgcttccaggaagccttccttgcaccccagtgctggatgctgggtcaagggcctttctccaatagtaccctgtgccctgtcacagtcctttattgctgcatggacctttcgttatttaggtctgcctgcagtcccacttccaggctgaactccctgaggtctctgattccctaggtgtcctggagtctggcccaggacctggccccacaggagtcccagcaggtgggcgctgagtgagggagtccccatgtctggtttcctctgtttgtccctcacctggtcgagtcccagaccctactgatcttggcctgtccagccaccaacagtaggctgccttccagtggggccacacccaggcctgccagagagatgcctccaagcagctgctccaggaagggccgggggaggggcctggggaggggtaagaatggagccccaagaaccattctgcccattgtgacccgccctgacctcacagccatccttcccaccgccaggcccaggaggttgggggagactaacctggcaaggagcccccaatgagccacctctcctcaccccccaaaaaacataagggggagcacaaaggccacagtctcccccatggttcagaaaggtgggttgggctgggagcaggggtcctactggggtgctgagtgaaatggagcaggtgctggggggcctgggagaaggtgggtggaggcccctggcttgcctgatgcaccagtcctcgccaggggtagctcctcccgggacaaggaccgaagtgcgacggtcagtagttcagtgcccatgcctgctggagggaaaggaagccatccttcatctacaccccagagggtccccaaccgcctgatccacgagaagtcaccatacctcctacaacatgcctacaatcctgtggactggtgagcacctctcctggggccctgcctggaatcgctggggtcctgggcccctcccagaccccctgggctactgagtgatgccccaccctgctgggtctaggtacccctggggacaggaagccttcgacaaggccaggaaggaaaacaagccgattttcctctcaggtaatgctcccaccttccctgatgtgggggtgtgggcagggagtggcagtggatgggggagggtcctctcggcctggcgggtcttccaggagactagaggccaggacgtcttccatgtagccagggccacttggccagcctccctctgacccgttgctggccccctgacctctccccatggccctgttcagtcgggtactccacctgccactggtgccacatgatggaagaggagtccttccagaatgaggagattggccgcctgctcagtgaggactttgtgagtgtgaaggtagaccgtgaggagcggcctgacgtggacaaggtgtacatgacgttcgtgcaggtgagcagccctcctcgggagtgtatgcgccacatgggctcagagcagctcccctcaccctcgccctctctccgccaggccaccagcagcggcgggggctggcccatgaatgtgtggctgactcccaacctccagccctttgtcgggggcacctatttccctcctgaggatggcttgacccgagtcggcttccgcacagtgttgctgagaatacgagaacaggtgggtgtgcctccgggagttgggggaccagggtgggggactaggaaacaagagcccctccccctagctgacctccaggtgtgcccccacctcccgcagtggaaacagaacaagaacaccctgctagaaaatagccagcgtgtcaccactgccctgctggcccgatcagagatcagcgtgggtgaccgccagctgccgccctctgccgccaccgtgaacaatcgctgcttccagcagctggatgagggctatgatgaggaatacggtggcttcgctgaggcccccaagtttcccacgccgggtcagtgccccacgcccgccttagcccaggctttggccttctgattcctatgctggtcagggacctactggctcctggcctcacccatagcttcctgtcctcctgactggcagtgacctccttgcccctagcctgtcggtagctatcggtgaagacccgactgctggtgtcagcagtgaccctctcaccttaacctagatgatgaccttctgtcccctgacttggtcagtgacccagtgaccctgacttggctaatgacattctgggctctagggggacaagtaacttactggtcctctgtgaaccaatgatattctgacctctggcttaggctattaccttctgtcctgtgggttgactcttgacctcacagcctgtccagagactgcctgttgagtgaactcccagcctctgcctggcccaaggcctcctgaccaccccgatctctgtccccactttcccattctctcacctgcatgttcttggtgcccccacagtgatcctgagcttcctgttctcctactggctcagccatcgactgactcaggatggctctcgggcccagcagatggccttgcataccctgaaaatgatggctaacgggggcatccgggaccatgtggggcaggtgacgggcactgggtgttccctggaggggcagcagggggctgtggggtggggcagaagctgggactggcctccagctttgtatccgcacagggctttcaccgctactccacagaccgccagtggcacgtccctcactttgagaagatgctctatgaccaggcacagctcgctgtggcctattcgcaggccttccaggtgacccctgaccccagcccagagaacaggcatctcactctggctgcccctcccaaggccttcctggtgactgtggcttctcttaatctgaatcccctgttccctcccatgtacccactacccaggcttccctcccccgcctgcctcagagaatgttgccaccttccacctgggcctccccagtgacctctctgttcacagtctcctttcttccctttcttagctctctggtgatgaattctactctgacgtggccaaaggcatcctgcagtacgtggctcggagcctgagccaccgggtgtgtgtccatggtggcaggcaggcctggctgtgggaggggttggggcctccactgccctgtgggccggggccagccaactctcccctccccacagtccggaggcttctatagcgcagaagatgcagactcgcccccagagcggggccagcggcccaaagagggcgcctactatgtgtggacggtcaaagaggttcagcagctcctgccggagcctgtgttgggtgccaccgagccgctgacctcaggccagctcctcatgaagcactacggcctcacagaggctggtaacatcagccccagtcaggtgaggacttctggggtcacctgacgggccctggtgcctgccaggcgtgtgagctcgcagacaaaggccattctcctcaggaccccaagggggagctgcagggccagaatgtgctgaccgtccggtactcgctggagctgactgctgcccgctttggcttggatgtggaggccgtgcggaccttgctcaattcagggctggagaagctcttccaggcccggaagcatcggcccaagccgcacctggacagcaagatgctggctgcctggaatggtggggcagcacacctgagaccgagcctgtctgtaggatcccccttcacaaagcccctgtctttccggcagcggctaaatgctcactctcccttgattagcgttattattctcagttgacaaaagaggcttaaggagcttgagtaacccgcccaaggtcacgcgcaagggctgggaaccccgccatgtctggctttggagcccaagatcttagggatcacccatggctccagggaggtgttggggcctaaggtgatagggtggacatgcctggagggtcctggccagcttcttaccactacttgtctctcctggctccaggcttgatggtgtcaggctatgctgtgactggggctgtcctgggccaagacaggctgatcaactatgccaccaatggtgccaagttcctgaagcggcacatgtttgatgtggccagtggccgcctgatgcggacctgctacaccggccctggggggactgtggagcacaggttgggggctgggtagaccgggagggcccgtctccccaacgcgtccccagcctacctctgccctacttctcccctccatgtggactccagtcctggctctgccaggtgcttgctgtgagtttgtagcttccctgggcccatttactcatctgggaagtgggctgatggcacctgcccaagagggttcatctggagggttaagtgaacaaatgcgtgaaagggcctcctctgggaaaggccctctctcctggggctctccccagcccctcccgtaatgcctgtcccccagcaacccaccctgctggggcttcctggaggactacgccttcgtggtgcggggcctgctggacctgtatgaggcctcacaggagagtgcgtggctcgagtgggctctgcggctgcaggacacacaggacaagctcttttgggactcccagggtggcggctacttctgcagtgaggctgagctgggggctggcctgcccctgcgtctgaaggacggtcagtgggggtgcagggctagtctggggtcctgggaggtgtaagtgcagcgtgggtgaagagctggtgtgggcaggagccctcctggctttgtgtctctgctacttattaatggcgtgatttttggctgctgtaatatttctgtgtctcaatttcttttttttaaatagagacagagtcttgctatgttgcccaggctgatcttgaaatcctgggctcaagtgatcctcccacctcggcctcccaaagtgctgggattacaggcatgaaccactacactcagcgtgttttgtttcgttcctttcttttctttttatttcctttctctttctttctttctctttcctttcttcctttctttcttttctttctctctttctttctcttttttttttttttttgagacagggtctcactgtcacccaggctggaatgcagtggcatgatcttggctcacagcaacctctgcctccggggctgaatcaattctcccacctcagcctcctgagtagctaggactataggcatgcaccaccatgcctggctaattttttgtagagatgggatttctccatgttgcccaggctggtctgaaactactgggctcaagtgatctgcccacctcggcctcccaaagtgctgggattacaggcgagagccaccatgcctggcctgtttcttaataagtaaaatggagctaacattggtactaccttacagggttgatgtaaagatgaatgtagctgttctgtaaacatgcttagcacagtaactgacacccatggattcagatattgaccaaggctcacttggtctctgccctcatgaagcttacagtatggtaggggagacagcgaaaatgcagtaatgatgcaaaaacacatgcacaaatgtgcagttaaaattgtggtgagtgccatgaagaagtaggacgctctatgtgtgcctgctccctatcacccatgtgccttgtctgtggttaaaggtttctttcccaaaactcaaattttagctcctcaaagatcaggactttctgccactgttgtatccccagggtctagtgtggttctggcacattgtaagtgcttaataaatgttaactgagtgaatgaaagggccttgggagagaaccacagaggaggaccaactcagcctagggagagattagaggacacctgtgacaggtgtcatttaaccaaggcctggagggaaagaggggccatgtggccatggagaagctgtggagagagttcaggcatagggagcagtgcatgacaggcctggtgcaggcagcctgtatcctggaggacaggcagggcccgcgtgttccaggagggcaccgaggagaatgctgaggccggcagggcacggaagccgtcttttttttttttttttcctaagaaaagaaggctggtctcaaactcctgggctcaggtgatcctcccgcctcggcttcccaggtgctgggactacaggtgtgagccaccatgcccggctggcaaggaggttttaagtggattgtgatctgctctggtatggttttaaggaggtcactctgaccactgatggagagaagtgggggtgggggaaacaggcgaccagttaggaggccattactcgtgttcagtccaggcaggcattggtgaaggctcagaggatgtggaagtatgagatggggagacatggtgagatttggatctcttctggccacagccctggcaagactcacagatggattagaagcggagggagagggagaggaaggggacaggatgatgccgctctagcttgagcagctgagtggctggacagaggcatcagcagcgaggagggagcctggagaccaacagttgaggctaggacaggtagagtggagggtgccataaaaaagacagcaaagtactgataactgctggagtggcatccacacccagagcggggaaggggcaggatgggcagggccttttctctgtcccgtcccccaagtggccctggatacagtcctgggcagggtcctgggactcagtgacctgcccttacccccaccccctgcctccctatgtgctgtagaccaggatggagcagagcccagcgccaattccgtgtcagcccacaacctgctccggctgcatggcttcacgggccacaaggactggatggacaagtgtgtgtgcctattgaccgccttttccgagcgcatgcgtcgtgtcccggtggcgttgcccgagatggtccgcgccctctcagcccagcagcagaccctcaagcaggtggggggtgagggcatctgggctgggacctcgggtaggagggaagttggggctgcgatggcagatgggaacagggggtggggttcctgggctgtccccagagctcaggtctgtgtgtgtgcaggcacgtggcctgtcagacagggaggcagaagttaatatgagtccgtggtggctgatgaagtgtttctctgtacgtcttggtgtcagtgtaattgcttctgtccatactgtgttactggtgtgtgtgtacttccgggtgtgtgtgaccctggaggtgtgtgtctgtgcacctacctttgagggggatgctggtgtgagtgtttgtctgtctgcatgtggatgccccatctgcaggtttgcctctgtgtctgcctgcatgcgtgtgtgtctggtgtttgtgtgtgtggtatctgcctctgtgtgggcatctactgtgtgtgtgtgtgtgtgtgtgtgtgtgtgtgtgtgtgtgtgtgactactctgtgtctgtctgaatgggtctctgtgtgctctgggtcttctgggtgtgtgtctccccatgtttgtatctgtaccattgtgtatatgtatgacatttccacttcggtattctcatgtgtgagtgtgtgtgtgtgttcccacttgccaagcattaactcatcctggcagctgagatgagtccctgttccttcttagagatatacggtggggcggaaggaggatggggaagccctggtggtctagggctcagccctccctcccctgacacaccggagtgacctttctattccggtcagatcgtgatctgtggagaccgtcaggccaaggacaccaaggccctggtgcagtgcgtccactctgtctacattcctaacaaggtacccatccctgtgagcccaatctgccacctccccagagctgccccctcccatcctcagctcctcaacatctccttcccctcagaatgttgggaagagggaacttcccagtgggcctttctaatgggcaggtgaccccaccccggcaggtgactctccctgctctgctgctgccctaggtgctgattctggctgatggggacccctcgagcttcctgtcccgccagctgcctttcctgagtaccctccgacggttggaagaccaggccactgcatatgtgtgtgagaatcaagcctgctcagtgcccatcactgatccctgcgaattacgaaaactactacatccatgactgccccaacccccttggggtggggcagaaggtgaagcatcccaactgactagagactcaggccctgcagggccctatagaacctgtggccatccctgagcaccctgccaccaggtgacctcggccatactcactgccccccttgggcacccactcaccctagaataaacttaacagtgtcccgtggtaa

SEQ ID NO: 604 - DNA, 5846 bp, Homo sapiens
gctttatatgagcttttatatttcacagaatggtgactttgcatatgccctggtgcattgtgggagctgctattgtcacgactaagacatttcttttggggtatccatctagccccagcctcgaaaggatggaagcagggcctccttgcaggaggtcatgttgtccatttgtctgctttcatacaagctggtccaaagaaagagttctctttcgtttggaacatctgttgggttggaagtccttccccaaatctatctgagtccttcttgctgcagagaaagccttcctgtgacctcatcctttcccctaaatgttgggaaatgctcctgagtcctgtccttgacacatacatcttccttgggttgagggatggggactgggacacatgctttgggaagggcaggtgcagagtgatggggctgacggggtgggggaagcagggggaggagctgtccctctgaggcctttgggaatcggctgtgccaggcatcctcagccctccagctaagcaacacagagagccaaaagaggctactagagacaagaaggccttcatggggccactgcttgtgggggatgtcagcagtggggaggagtgaagcaggaaggaaccgggagactggatggaattgctcccttcacacggtcacacatagccacacatggtcactgggaccagagtcagctctgtctgggcagccaggccctcagtgcaagccaccagcccatctggaggggattagtgctccggccaacaaggtcagctggccccttcctagctggagcctactcaaccttgccaggaagtcagagagctggacaagtggagcccagcctggggaggtggaagagagggaggatggagcatggtgaagcacaggtggcctttttggcagccccagccctggctttggaacagtctgggcagtgtgccaacccctcttgccactgtcgtcccattgaccctcatgaatgagttgcgaggcagttaccttcagcctcctatggataaatattcgaggcccagagagggtaagagacctgcctgcgacccctcagcacttctgtttctctctggggtcttgagggtacaataaagacccctaaggcttcctcttctcgcaggaggtccaggcgcagctgtgggggagggtgcccttggtgtcttctgtccctgcagccagtctgctttctactcggcagctcctctctccctcctgggatgagatgtgcacgcgatgatgggattctgtaaatgggttgggaagaaggagttacctccttaaagggttagttctcccaggagtgctcgaatttctaaagggggcagggtcccacataaatctcactcagaagcaggattataagagttcctgcagcatcccttcccctttgctggtccctcttgagtgtgcaccctgttctaccagcggaacacctgcgggccagggtcactggagacagggccataccgtctgggcggtcacttaagtaacttcatcattctgagcaccccccttccttatctgaaaggtggggggccatccacccagctctcagggctgttaaggtgactaaatgggataatggttgtatcatccctgagcaaagggtatcacagatgggaagattatcttagctccgcagggagccagatgggctgtgagggaggggtaaaggcagggctggagggggctggaggggctggctgagcagggtatatatggggggggttcttcctcaaacccagaaaaactcttagttaggcttagtgtctttgttgagaaactgaggcccaaagaaaggaatttcttgtccctttgtttccctttccctgcctgaggtcattcattcacctaacaactttgtgcccgacactagacaaggccctagtgagcaaaatgaacatagcccctctgggaacacagagcctagatagggagatgatcatttcattactgcaaacacaaacatataatcccagcctgggctaagtgctgtgaagttccagacttgtgtctggctcggtgctgtatcctaagcaccttggcacttaagtggcattgaaatacttgctggaaagaaggccactctgaggaggtgatgtcagagctgaggcttggagggctggagttaaataaagatggtttcaggtcttctttgccttccctgtaggttctgcctctgcctcctctctggcactcaggctaagggtaagcatctccgactggccatcagccccaacatgccgagtacagggatcagatcctgtcttgcgtggccggtctcccctaggtcctgaacccagggaagtgcatgtggatctcaatttatctagatggtgcgtttgtgcctgccctcctttcgggcatgttctagaacagagttcagtccagagcccaggggtggccgggatgatggatgagggtgtggggcctgctgaccaccaggggacctgatcattgggctgggccagcctctctgtcctcattttcccctctgcaaagaaggggtgttgggcgtccctacttctcgcgccagccccggggcctctatcctggcgggaagggcaggccgacccggcagactgcggcctctcgggagggaagaaggtgtcagacgcgcggagcaaccataaatagcccccctttcccagaagacggcacggggttcaagactcaggcgccgcatactcagaatgagagcagagactcccgccaggaaaaaaaggcacttaggggatctgctcattagcatgaaatgcaaatgagcccgcccggcctcatttacacaactctgtgcatggattcggcgaaagggcaaccagggagacgacggcgcagcagccactctgccacttcccccatcccctccccccatcggccggggcgggaactgagacgaccccaaccctctgcggtggcgggaggtgcgcgggggctgcgtgggtggtgcagccttaggagagtgaacaacgcccaggggtgatggcctcagcaaagtgaggggtggtgatggaggtcatccgacccatcccgccgcctctccgcagtggcgcaagcgccccaaaatctccggagagggaactgactgacccactaggttccgccgtgtctacctctcgcagatgttggggaagtgcttcccggcgtctaatcctcgctgttcccccctccaccggcgcccagcacacccgcggcgctccgctcccgggtacccacagctttctggagtggcgccggcggcaggagagagctagagccgactgagccccagaactcggggaggtaggcggggcaagggccggggtctgcgcgtgcgtgtgcacgcgtggaaagcacaaacccacgagggcccgctgccggtagggttaaggtgagtgagtgaaggcggcagacccgcgaagttccagttccgcggacactccttccctaagccacatagggacttaagagaaactgaggcacgaagttggggggtggcggtggtggggactttgaaggtcgagtcgataaagcccagctctgtgcttccgccccctcccacacactcgagacccccacaggttccttcttaggggtcctcgctctgctccgcagcccctcctggggatccgggctctgcggtccagcgcgacctgcctggggccacgtgttcaagcacgaagcccctgcgtggagtccacgcccttcaaaaggtccctaggggcaaagggatgaagcccaggagcgtcaatgtgaggtcaggtccagcgggttagggttacgaggtcagggtcgaagtctcagaattgactcgggagtatgaccaataagcccaagagatttgtggaggccacgcccagaccatgcctaccctagcctttctcgagctccgcccgtttctccaagactgggcccctccagcctgaagccccacccccaggacatccagctccgctccttcccttccccagtcccgcagccaagctcaactccagggtgggagattaaccaggtggagacctgggatttcgctctgggaccccctggtgacaaccctcacccccgtgccgcctgtctcctttcttccccaggcccgcccagagctgagctccgtcctccggctgctgcccaaatcaggggtcgtggacaaaggatgcctggggcctgcggccctacgccaggaccccgcgccgaatactctgattcttcgggctccctccaagggagtcccaaagaccccaatggccaataggaaagtgggttcggtctgggcagcagtctgattggctccagccttcgggagcggacccaggggcaaggggaggggagaggggcggtcctgggttttggggtgggaatcggattccagctgtggttctctccctgcgctcccgcccgcactgccacggcggacggccaatgggcgcgcggctcggggccggcggcgtccggcgattggctgcggggctgtctgggggcggggccgaggcttgaagttgaagtgagggatccagctgtggtgtgcgcggggctcctcgccgccgctttcgctcgctcgctccgcgtctcggccggaggaggaggctgtggcgccggcgacagctacggcagcggcagccaccgcggcggctgcggcggcggcatctccgcctccactcccgcccgggactgccccccactgtctccccgcccctcccggacagtgagcccgcggcggggcgggggaaggagccgcccccaccccctccaagcccacccctaaagagatccctcctcccctcccccgccgcctggcgcggagccgggacgatgctgaccccttagatccggctccagctgcgccgcgggaagagggggcgcccctccccggacccccgccctccgccgctgccccccttttcgttcgccctctcggggcggcttcgccgaaggtagcgccgaatccggcaaccggagcctgggcgcgaagcgaagaagccggaacaaagtgagggggagccggccggctggcccgggaagccccaggggcgcaggggaagcgggactcgcgccgggcggggtttccctgcgccccggcgccccgcgggcagcatgcccctgcgggcagggggagctgggctgaactggccctcccgggggctcagcttgcgccctagagcccaccagatgtgcccccgccggggcccccgggttgcgtgaggacacctcctctgaggggcgccgcttgcccctctccggatcgcccggggccccggctggccagaggatggacgaggaggaggatggagcgggcgccgaggagtcgggacagccccggagcttcatgcggctcaacgacctgtcgggggccgggggcggccggggccggggtcagcagaaaaggacccgggcagcgcggactccgaggcggaggggctgccgtacccggcgctggccccggtggttttcttctacttgagccaggacagccgcccgcggagctggtgtctccgcacggtctgtaacccatatccttcggggcacgacggccaggcgcggggtcagaagggggacgggccgcaccgccgggggtcgggggggaagaagacccaccgccaggtgagtcgaagtgagcccggagggtaggcggatggggggggggctgccagggaggggagggggcaccagagtgggagcggagacgcgagcaggtctcgtcggtaacccgggcttaccccacctgcgtacacacacctcagtcttcctgggttgggggggtggggatccaggccaggagaagagagctgtgccccgctggctcgcagctggacgccctccagatgtggtcaggggagggtcgtcatcctccagatgtgggaagc

SEQ ID NO: 605 - DNA, 5848 bp, Homo sapiens
gctttatatgagcttttatatttcacagaatggtgactttgcatatgccctggtgcattgtgggagctgctattgtcacgactaagacatttcttttggggtatccatctagccccagcctcgaaaggatggaagcagggcctccttgcaggaggtcatgttgtccatttgtctgctttcatacaagctggtccaaagaaagagttctctttcgtttggaacatctgttgggttggaagtccttccccaaatctatctgagtccttcttgctgcagagaaagccttcctgtgacctcatcctttcccctaaatgttgggaaatgctcctgagtcctgtccttgacacatacatcttccttgggttgagggatggggactgggacacatgctttgggaagggcaggtgcagagtgatggggctgacggggtgggggaagcagggggaggagctgtccctctgaggcctttgggaatcggctgtgccaggcatcctcagccctccagctaagcaacacagagagccaaaagaggctactagagacaagaaggccttcatggggccactgcttgtgggggatgtcagcagtggggaggagtgaagcaggaaggaaccgggagactggatggaattgctcccttcacacggtcacacatagccacacatggtcactgggaccagagtcagctctgtctgggcagccaggccctcagtgcaagccaccagcccatctggaggggattagtgctccggccaacaaggtcagctggccccttcctagctggagcctactcaaccttgccaggaagtcagagagctggacaagtggagcccagcctggggaggtggaagagagggaggatggagcatggtgaagcacaggtggcctttttggcagccccagccctggctttggaacagtctgggcagtgtgccaacccctcttgccactgtcgtcccattgaccctcatgaatgagttgcgaaggcagttaccttcagcctcctatggataaatattcgaggcccagagagggtaagagacctgcctgcgacccctcagcacttctgtttctctctggggtcttgagggtacaataaagacccctaaggcttcctcttctcgcaggaggtccaggcgcagctgtgggggagggtgcccttggtgtcttctgtccctgcagccagtctgctttctactcggcagctcctctctccctcctgggatgagatgtgcacgcgatgatgggattctgtaaatgggttgggaagaaggagttacctccttaaagggttagttctcccaggagtgctcgaatttctaaagggggcagggtcccacataaatctcactcagaagcaggattataagagttcctgcagcatcccttcccctttgctggtccctcttgagtgtgcaccctgttctaccagcggaacacctgcgggccagggtcactggagacagggccataccgtctgggcagtcacttaagtaacttcatcattctgagcaccccccttccttatctgaaaggtggggggccatccacccagctctcagggctgttaaggtgactaaatgggataatggttgtatcatccctgagcaaagggtatcacagatgggaagattatcttagctccgcagggagccagatgggctgtgagggaggggtaaaggcagggctggagggggctggaggggctggctgagcagggtatatatggggggggttcttcctcaaacccagaaaaactcttagttaggcttagtgtctttgttgagaaactgaggcccaaagaaaggaatttcttgtccctttgtttccctttccctgcctgaggtcattcattcacctaacaactttgtgcccgacactagacaaggccctagtgagcaaaatgaacatagcccctctgggaacacagagcctagatagggagatgatcatttcattactgcaaacacaaacatataatcccagcctgggctaagtgctgtgaagttccagacttgtgtctggctcggtgctgtatcctaagcaccttggcacttaagtggcattgaaatacttgctggaaagaaggccactctgaggaggtgatgtcagagctgaggcttggagggctggagttaaataaagatggtttcaggtcttctttgccttccctgtaggttctgcctctgcctcctctctggcactcaggctaagggtaagcatctccgactggccatcagccccaacatgccgagtacagggatcagatcctgtcttgcgtggccggtctcccctaggtcctgaacccagggaagtgcatgtggatctcaatttatctagatggtgcgtttgtgcctgccctcctttcgggcatgttctagaacagagttcagtccagagcccaggggtggccgggatgatggatgagggtgtggggcctgctgaccaccaggggacctgatcattgggctgggccagcctctctgtcctcattttcccctctgcaaagaaggggtgttgggcgtccctacttctcgcgccagccccggggcctctatcctggcgggaagggcaggccgacccggcagactgcggcctctcgggagggaagaaggtgtcagacgcgcggagcaaccataaatagcccccctttcccagaagacggcacggggttcaagactcaggcgccgcatactcagaatgagagcagagactcccgccaggaaaaaaaggcacttaggggatctgctcattagcatgaaatgcaaatgagcccgcccggcctcatttacacaactctgtgcatggattcggcgaaagggcaaccagggagacgacggcgcagcagccactctgccacttcccccatcccctccccccatcggccggggcgggaactgagacgaccccaaccctctgcggtggcgggaggtgcgcgggggctgcgtgggtggtgcagccttaggagagtgaacaacgcccaggggtgatggcctcagcaaagtgaggggtggtgatggaggtcatccgacccatcccgccgcctctccgcagtggcgcaagcgccccaaaatctccggagagggaactgactgacccactaggttccgccgtgtctacctctcgcagatgttggggaagtgcttcccggcgtctaatcctcgctgttcccccctccaccggcgcccagcacacccgcggcgctccgctcccgggtacccacagctttctggagtggcgccggcggcaggagagagctagagccgactgagccccagaactcggggaggtaggcggggcaagggccggggtctgcgcgtgcgtgtgcacgcgtggaaagcacaaacccacgagggcccgctgccggtagggttaaggtgagtgagtgaaggcggcagacccgcgaagttccagttccgcggacactctttccctaagccacatagggacttaagagaaactgaggcacgaagttggggggtggcggtggtggggactttgaaggtcgagtcgataaagcccagctctgtgcttccgccccctcccacacactcgagacccccacaggttccttcttaggggtcctcgctctgctccgcagcccctcctggggatccgggctctgcggtccagcgcgacctgcctggggccacgtgttcaagcacgaagcccctgcgtggagtccacgcccttcaaaaggtccctaggggcaaagggatgaagcccaggagcgtcaatgtgaggtcaggtccagcgggttagggttacgaggtcagggtcgaagtctcagaattgactcgggagtatgaccaataagcccaagagatttgtggaggccacgcccagaccatgcctaccctagcctttctcgagctccgcccgtttctccaagactgggcccctccagcctgaagccccacccccaggacatccagctccgctccttccctcccccagtcccgcagccaagctcaactccagggtgggagattaaccaggtggagacctgggatttcgctctgggaccccctggtgacaaccctcacccccgtgccgcctgtctcctttcttccccaggcccgcccagagctgagctccgtcctccggctgctgcccaaatcaggggtcgtggacaaaggatgcctggggcctgcggccctacgccaggaccccgcgccgaatactctgattcttcgggctccctccaagggagtcccaaagaccccaatggccaataggaaagtgggttcggtctgggcagcagtctgattggctccagccttcgggagcggacccaggggcaaggggaggggagaggggcggtcctgggttttggggtgggaatcggattccagctgtggttctctccctgcgctcccgcccgcactgccacggcggacggccaatgggcgcgcggctcggggccggcggcgtccggcgattggctgcggggctgtctgggggcggggccgaggcttgaagttgaagtgagggatccagctgtggtgtgcgcggggctcctcgccgccgctttcgctcgctcgctccgcgtctcggccggaggaggaggctgtggcgccggcgacagctacggcagcggcagccaccgcggcggctgcggcggcggcatctccgcctccactcccgcccgggactgccccccactgtctccccgcccctcccggacagtgagcccgcggcggggcgggggaaggagccgcccccaccccctccaagcccacccctaaagagatccctcctcccctcccccgccgcctggcgcggagccgggacgatgctgaccccttagatccggctccagctgcgccgcgggaagagggggcgcccctccccggacccccgccctccgccgctgccccccttttcgttcgccctctcggggcggcttcgccgaaggtagcgccgaatccggcaaccggagcctgggcgcgaagcgaagaagccggaacaaagtgagggggagccggccggctggcccgggaagccccaggggcgcaggggaagcgggactcgcgccgggcggggtttccctgcgccccggcgccccgcgggcagcatgcccctgcgggcagggggagctgggctgaactggccctcccgggggctcagcttgcgccctagagcccaccagatgtgcccccgccggggcccccgggttgcgtgaggacacctcctctgaggggcgccgcttgcccctctccggatcgcccggggccccggctggccagaggatggacgaggaggaggatggagcgggcgccgaggagtcgggacagccccggagcttcatgcggctcaacgacctgtcgggggccgggggccggccggggccggggtcagcagaaaaggacccgggcagcgcggactccgaggcggaggggctgccgtacccggcgctggccccggtggttttcttctacttgagccaggacagccgcccgcggagctggtgtctccgcacggtctgtaacccatatccttcggggcacgacggccaggcgcggggtcagaagggggacgggccgcaccgccgggggtcgggggggaagaagacccaccgccaggtgagtcgaagtgagcccggagggtaggcggatggggggggggctgccagggaggggagggggcaccagagtgggagcggagacgcgagcaggtctcgtcggtaacccgggcttaccccacctgcgtacacacacctcagtcttcctgggttgggggggtggggatccaggccaggagaagagagctgtgccccgctggctcgcagctggacgccctccagatgtggtcaggggagggtcgtcatcctccagatgtgggaagc

SEQ ID NO: 606 - DNA, 16772 bp, Homo sapiens
cggtgccgtggcccaggggccgggccgaggtcccgggggcggtgccttgcgggcccgtcccggggcggtgcctggtgggctggccccgcggctcctcccctctctgcgggcccagtcgccctttggccgggcgagctaatcgtcggctcaatgacgacgaggcccgacccttcccgtccaggacctacagagacaaccgaaggagagcccaaggcggcttctttgctgtcgccgcccccactgaagcaagagctccccggctccactgaaacaccagctcatttaagctttccccaacgcccggccctccgggacgatacctaacaacgaccggcgcccgcatctggaataggctggcgagatacttagtatccgagggctcgggacttggcgccatcgaggtcatggggacccaggatccagggaacatgggaaccggcgtcccagcctcggagcagataagctgtgccaaagaggatccacaagtttattgccctgaagagactggcggcaccaaggatgtgcaggttacagactgtaagagtcccgaagacagccgacccccaaaagagacggactgctgcaatccggaggactctgggcagctgatggtttcctatgagggtaaagctatgggctaccaggtgcctccctttggctggcgcatctgtctggctcatgagtttacagagaagaggaaaccctttcaagctaacaacgtctccctaagcaacatgataaagcatataggcatgggcttgaggtgagtagaccccattgcctagaatgcctttggcttcactttgttccagctcaaaacttctagcagaggtgggaaagggcaagaaagcagttgggcttcttgtctgagtgaagcggtccctatccctggcatattttaggcctgtggttttggaccgtgagaccaggtcacatctctttgcaacacccttccctcccagtgttttgtcttttcagaaggaaagggtaggaacatttggtcatgcaatcagcctttcccattcaggctcttctcacatactggtttccaatgacttccctttgggattagctatactttgtggcaaggtaggaaaggataatctggctgctgtgatactaacacaatgttgttttatttgggggtgggggggtctcaaccccttatttcccacaagcagctggggcattctctgtacctcattagacacactgttagagtcccaacactactgcttctttcttcaagctttagctccagggagtaggtaagaagagcctccctgccctcacctctgaagtgatgagaaggtgctgtcattctgttctgggatagagagctcttgatattaagtcatttatcagagaggcactgccatagatgtagaacccatctagatccccactgagttcaaagactagtgatgaggagccagacccattaacaggaacaggtggatgtgaggacagaaagcatcaccctgaggtcatcctgactcagtctacacaatacacacagaactgtggagggaggcataaagcttgggaaaccctgcccttacagtttctagagtaggagacccttcatttccccagtcagtgctgtggggctgtgatggggagatcagttatctaaccctagccctggggagtgggaagggcctgatgctgcctgcacatctggctttgttggtgcctgtgggtagcctgtagcagagaagaatcatccctccaggctgcttctggaatcaattcagtccaagtttgaccccaaaagtttttgcatcaaaataggatctagtgtacatagagaagtacactgagttgcatgtggtaggaacaatgagatcaagaaaagatgggcatcctagcctcttagcccttaaatatgaactgagtcatagaggcctgaagctgtgctcaaccccctggaccctggctccccattccaggatagagtggggggtactgatacaaggcttttggaataggatgagttcctatgaggagaaagcacaggtgagacaagaattctaagtgataactcttgagttgaggttgaaattgtggagaaggccaaataggtcaggaatggccagctaccatattaagggagtaagagagctcctaagatggagctgaactgtgggcactctgaccaggagctctagcaagacagaattctctgggtcttaccttcgtaagaactcaatttcaattgttctcccttccagccagagtccactcattcaataaatatttattgagtgcttgttccatgccagatagtcctttgttctgtctgtcctcatagattgcagttactctccctggttgccctaatcctcggccacaccctccctctaccagtcctttctggtctctagtttcaaagtccggttttctctaagctggcagagaggattctctgccttcctgtcatcccatcctttgtcttccctcttctttccacccctagaatgtgctgtccctttttattttattattattttttttttgagacagtcttgctcttgtcacccaggctggagtacaatggtgcaatctcagctcagtgcaacctccgtctcctgggttcaagcgattctcctgcctcagcctcctgagtagctgggattgcaggtgcctgccaccacagctggctaatgtttttgtatttttagtagagacggggtttcaccacattggccaggctggtcttgaactcctgacctcacgtgatccgcccacctcggcctctcaaagtgctgggattacaggtgtgagccaccgtgcctggccgctgtccctattcattaatcacatttcttctcctctgctccagtctgttatctctcttgtgccccatcatttgtatgttcattcatctgtaaaattggcaaatatgcattgactgcagaccatatgtcctaccctgtgcttggacctgagggtaatattcagctagtctttgtcattgtccctttccccaaggaacttaaaagtatgtcagcctcacatgaggaacattgaaataacaaggcaatgtctgattaggaattgagataacagtttgtatatatgagtaataatcatacctgtactttatggctttcttatctattatgtcatttgatctttcaaccatttcattagatagctagagcaggtggtatccccattttgtagatgaggaaactgggacttaggggttacttacccaattatttggttagaagtggtgtgactgaacagtaggcataatgtggcagtaggcaggagagtggaaatgggaaagagtctggcagggcaggggctacttagtgaggacccatctggaatgagaatttgtaggaaataagattagaagataggctgggacagatgtcagagccttgaaaacagaatcgtttgcctattgaaaacagcctcaatcatttgcctcttggatatagggctgtaccaagcccaggaaaatgttgggattttttgaaggctttaccaagagcaaaatcagaaagcttcacagtttaaatgttgaatttaaaaaaaaaaaaaaaaaaggcttgagaggaaatgtccagaaataaatataaacactgattgtctatgggtgagattatttttttccccctttcacctttcataattagaaagaaaaatgatcattttaaaaagaagaaaggccagaagcggtagctcacgcctctaatcccagcactttgggaggccgaggcgggcggatcacctgaggtcaggagttcaagaccagcctggctaacatggtgaaaccccatctctactaaaaacacaaaaaaatgtgccaggcatggtggcgggcacctgtaatcccagctacttgggaggctgaggcagaagaatttcttgaacttgggaggcggagtttgcagtgagccaagaccgagccactgcactccagcctggacaacaaggaacgaaactctgtctcaaaaaaaaaataataaataataaaaataaagataagaaagttattcccagcagcctatgcctgttttggaggtaggggattgggggcggaggctgtaggccaggaaaccataaatggtcctttcagcacgtcagacagaagctcctgatgttggaaataaagcagtggtggtggtgctagagaggtaaggagagatcagaaagccccttctgaggagaacaaaggagagaaacaaagccactccttcacttcagctggggtgactgggaagatgaagggaccttgaactgtatagaaatcaagaggaagaaaggtttgaaagcagatgtccttgggacatttaatgggaggtcacagagagaggcaggtgactcagcctgtgaacagctgcccacctgcccccttccactcacattgcctcttgctcctcaggtacctgcagtggtggtaccggaagacccatgtggaaaagaagacacctttcatcgacatgatcaattctgtacccctaagacagatttatggtgagccccaccccatctctgctctgctcagagaaggcctagcctccaggtctaccacagttaggaagagacttccagcttatgcaaattgcactgttccatcccctaggttttcagaggaaccaggctttatagtctagaaagttagaaatgggcttattttcctctcccaataccccactaaccaccctgatttctctaggttgtcccttgggtggcatcgggggaggcactattacccgtggctggagaggccagttctgtcgttggcagcttaaccctggaatgtatcagcaccggacagtcatcgctgaccaagtaagagccaggaggtggagaggccaggacaatacctccccaggccaagaaggaaggacctcttggctagtgtagaaggtagcagttagatgtgaataagattcaatctaataagtactctcgggatgcttcctgtgtgcccagccctgagctaggatataccgtaggaataagacacacacaagcacacattccttgaaagagtaaacagatctggcatttctctagtaaatgcctcctgtctacctcactgccccaacccaactagctgaggcagcccccaaccacagagaatgcagagaattcccaaatcacttaacctgcctgaaagaacattttgtaggactggaagggaaaagaaaacccaaagtctataaactcatgggaaaaaaagacacgtagtacaaggttcctcaccctgattgaggaaccttcaccaaagttcagctcctctgctgatcactcccctggaggtctcctggcttagggtctaaaaagctccttctctcccaggcttagatctctagccttcttccctcttctgaagcttcacttttttccttttgctcctgcatcacatctgggccttaaattgccagaagtatgtgtcctgcctctcatcatctctctctagttgaccgcccctttagagttgcctaggaagttcctctttcttggctccagcattcagcctcatcttcaaaggaaaaatgactagcaaatctttagtccaattaatgacaatacccttcctggttcacgtttaccagccctgcccatgtcccaagatccctctctgcctcatcccttaggtatcctgaggggaatggcttccagaattgtgactctacaattaaagtaattattgcatgcttaacatgtgctagacactgtgctaggctctttgtatactgtttaatattaaaaacaatcctacaagggaagtaccactattatgctcattttgcagatgaggacactaagatccagagaggtttagtaacatgcgcaaggtcacaaggttggtaaatggaaaggttgggattcagaaccatttctttctggggtgaagagcttgtggtcttaaccattatgtaccattccaacaaaatgaaaaattattttatacagttgtccctcagtatccatggggggttgggcccaggacctgctatccgaggatgctcaagtctttgatttgaaatggcttatagtatttgcaaataaccattgcacatcctcctatatactttaaatcatctgtagattacttataatacctcatacattgttacataaacccttgttgtgccgtacagtaaataaagtgtgtacatattcggtacagacacaactttttttccacatattttagatttggttggttgaatccactgatgtggaactcacagatatggagagcccactgtatacaataaaaatatttgacatagtttgaaccagggaaagggatattaatccctcatagctcctaccctccaagagctaaaactttttttgagaaaataagacttaggggaaatggagactgtgagaccacatcagtgctaaaaggagaggggtggatagtatactgtggaaaaagggacggtgctgcagatttcgctcattccctccacatacatgccaactctgaagaagggtgcatcagtgaattaaaaaatgtccctaccctcagaagaatccatacagcagtcagggacacagaatggtcagtcaatacattataacataatacaccaaatgctagaatagaaggggaggggggcacacataatgactcactgctggaagaagtagaggaggaagagatggcttttgacctaggctttgaaggatgagaggtttcaccagatagcgaacaagcatgagcacaggcatggaggagagaatgtagtgtgctcaaggaacagtgagtgtttttatatgaacagactataggtgcttgaacaggtgatgagtctgatgggcagggagaggccagctcaagaagggccttgaaagccaggcaagagttgagactttagcctgagggccatggggagtcactgaaacatcctaaccaaggactgacatatcttgatttgcctgtgagaaagatcactctgctacccagatgaaaagggccacagaaaaagcaggagattgggcttaagtgaggtgctaacaccaccgtagtggagaagggagagaaagcttgggagatagatggatggggaggtagcaggacttggtgattcactgagcctgggggatgacttgaagctgatggtgcagtggtaacagttgcaggctctgaaaggggaggagctgatttgaggagagggaagacttagtctgtggtccctgtggtttaccccgttccagcctatctgccctcttaagttcacagtgtgcctgcgtcgggaagggcagactgtgtaccagcaagtcctgtccctggagcgcccaagtgtcctccgcagctggaactggggcctgtgtgggtactttgctttctaccatgccctctatccccgagcctggactgtctatcagcttcctggccagaatgtcaccctcacctgccgtcagatcacacccatcttgccccatgactaccaggtgaggcccccacatctgtatcttccattgccctcccttccccaggacctgcctctgctagaaactgcatggcctgcgaggcgcggtagctcacgcctgtaatcccaacactttgggaggccaaggcaggcggatcatgagatcaggagatcgagaccatcctggctaacacgtgaaaccccatatctactaaaaatacaaaaaaaaaaattagctgggcgttgtggcaggcacctgtagtcccagctactcgggaggctgaggcaggataatggtgtgaacccgggaggcggagcttgcagtgagccgagattgcgccaccgcaccccccaaaaaaaaaaaaaaagaaactgcatggcctgtgaaagggaggttggagccatgaacatcacactggcttcccagaaccaccgcccaactggttctggtcttctatattccctgctaggcagcttgcctgggaatatggggagatgcaagtggacaaaagaagagtacactggggagtatttgagtcaggtcctctgtgtgcccaggactgatcctagcagagtggggtcaggaggcgctctactgggaccgtctgagtctaatcttctgcccccaggacagcagcctgcctgtaggagtctttgtgtgggatgtggaaaatgaaggggacgaagctctagatgtgtccatcatgttctccatgcggaatggactgggtggtggagacgatgccccaggggtttgtggaatgagcccttctgtctggagcgtagcggggaaactgtccgggggctgctcctgcatcatccaacccttccaaacccctacacgatggctgtggctgcacgagtcacggtaaggaaagagcctgccctataccttagcccctgaaccccacctccaccccagcatggtctcttcatccaccctcatcatactcctgtaagcccctgggcctgggaggttaagagtaagtaagaggagctggggagctagccgggacccagtgtactcgtggagcctgccctcacagtccctgaccccttcacaggcagctaccacggtaacccacatcacagcctttgaccctgacagcacggggcagcaggtgtggcaggatctacttcaggatggacagctggactctcccactggtgatggggggtctgactgggagatggtgggaagagaggttgtccctgtcttgggaccaggggtgggaggcctggtaataagtaggccttgtttccatgttagggatccctatccctggggctgaaggggctcctgtcctgaattctcttgtgtttctctcaggccaaagcacccctacgcagaaaggagtaggcattgctggagctgtgtgtgtttccagcaagttgcgacctcgaggccagtgccgcctggagttttcactggcttgggacatgcccaggatcatgtttggagctaaaggccaagtccactacaggtgaggggaccaagaaagtgtaaggatccagagtgctggggctctgacctggggcttgtgttcatccttccccttcccaccccaggcggtatacaaggttctttggccaggatggagatgcagcacctgccctcagccactatgcactgtgccgatacgcagagtgggaagagaggatctcagcttggcagagcccggtattggatgacaggtgccagtggggcccatttcttgcctttctcctgggcactcactccaaatgggactcctcgatttactctccacccaccaaagtcagtagacttgcactgggattcatttgatgatcccactctgctgaacccccaaatcctttccatcttgggaggtacatgttccttaaaccatttcctcctcctcgcttcccagatcactgcctgcctggtacaaatctgcgctgttcaatgaactatacttcctggctgatggaggcacagtgtggctggaagttcttgaggactccctaccagaggagctgggcagaaacatgtgtcacctccgccccaccctacgggactacggtcgatttggctaccttgagggtacaggatgctggtgggctgggatatggcaggccatccccaagtcaggatgatggatttgcctaccccagggtattggttaggatgagggggtgttgggtgtggactagtaacaatgccccacctctaaatctagaggacaagctacagaggggtttgaaggggaagcaggaattctggcaacagtgtgtctcattcattcctccaggccaggagtaccgcatgtacaacacatatgatgtccacttttatgcttcctttgccctcatcatgctctggcccaaacttgagctcagcctacagtatgacatgggtgaggatcccttttgtgccgcttctgccctcttggctccccatacccccgaacttctgtggtccctcagattgtctcttctttcccttcccttcatacgtatctgcatgctgcttactggttccccactgcagtcacacacatagctgtgtgcccctcctcaggcatgcccattccctgcctcccttctgtgtctctcccccagctctggccactctcagggaggacctgacacggcgacggtacctgatgagtggggtgatggcacctgtgaaaaggaggaacgtcatcccccatgatattggggacccaggtaaaagtccaccccaaggtcagcttccctccctcaacttttgcaccctctaccctatccaccaatgcaagtgacccaagtcccctcctctcccacagatgatgaaccatggctccgcgtcaatgcatatttaatccatgatactgctgattggaaggacctgaacctgaagtttgtgctgcaggtttatcgggactattacctcacgggtgatcaaaacttcctgaaggacatgtggcctgtgtgtctagtaagggatgcacatgcagtggccagtgtgccaggggtatggttggtgtctgggaagagcctagctggttgttgcctttcctcggtacctaggtcttcaacatcttggtccctctctaggctgtgatggaatctgaaatgaagtttgacaaggaccatgatggactcattgaaaatggaggctatgcagaccagacctatgatggatgggtgaccacaggccccaggttagcgggtaggggtttccaggaggcctgaggtgagaaactgggcaacaagggattgtagggctcaagaaagaatgactcattgtctattacacggcatgggagcagctggagctgccagtctgacccccaaacccatgtccctgatcagtgcttactgtggagggctgtggctggcagctgtggctgtgatggtccagatggctgctctgtgtggggcacaggacatccaggataagttttcttctatcctcagccggggccaagaagcctatgagagactgctgtggaatggtgagttcggggagcctaagtagtcttaaggcagctgagaggacaccaggagccttatttttctcttcctcgactccaggccgctattacaactatgacagcagctctcggcctcagtctcgtagtgttatgtctgaccagtgtgctggacagtggttcctgaaggcctgtggcctaggagaaggagacactgaggtgagagaggaggaggagcagccagagagaaaaatgggttttccctggaggtgggaagtaagtatatgagaccatgttcctgcccttgcccctccaggtgtttcctacccaacatgtggtccgtgctctccaaactatctttgagctgaacgtccaggcctttgcaggaggggccatgggggctgtgaatgggatgcagccccatggtgtccctgataaatccagtgtgcagtctgatgaagtctgggtgggtgtggtctacgggctggcagctaccatgatccaagaggtaatgcactccttttcccatctctccaccatctgtatcctggcccagaaaacttcctcaaccaccaaatttcttcaaggcataacccaatgccatcttgtccgtctataaagcctcccatttttccctggtatgcattccagctcctgccttcaggcttctgtctgtgggtcatagttatctcctccacttgctgggagctccttgaaggcaaagactctactgcctccatctatccagtggaagtggctcttcagagggtgccaagttagtatgtatgactgtcatctctcccaacagggcctgacttgggagggcttccagacagctgaaggctgctaccgtaccgtgtgggagcgcctgggtctggccttccagaccccagaggcatactgccagcagcgagtgttccgctcactggcctacatgcggccactgagcatatgggccatgcagctagccctgcaacagcagcagcacaaaaaggcctcctggccaaaagtcaaacagggcacaggactaaggacagggcctatgtttggaccaaaggaagccatggcaaacctgagcccagagtgagccgtctgaactgtgggagggaagtgctaacagcccagcctccagcctggcctttcctccttcccctctgaacctcctgcaaccctgagccatcaggacaatcataccccttcccttctctccacccaattgtgccagtaaatgggggttgagggtgacctaggcagcattagaatcacttatttatttctttcctcacctgttccctgactgcgtgaaatgttcagggaggtcagttgatttccccaggtacattcatggtgtgacagacacatgggtacaaataaaagacccagaaagccattaagtgtggtgtgtttgagccctcagtcgtcctgacagggcacaggagctgcggccagcccttgcccaccgctttttatttggacacagatggggagccccccaggctcctgctgagaccccccacatatcctcatatctagcctgagtatctgtcctgcaaaatgacagaggggctaccagtaggaagccatcctcccttccttgtgagatttgcctgcagggggaggatgggacctcggcagagaggctctgagaagaggtcagggaatggccactccaggggaggctctgcactgggagcctgaggcatgtaatgcagcaggcaggaagtgttgccaggggcctggagtacacagtctgagccgtccaaccactggtgtgtgctgtctttcggcacttctgactgcagggcaggcagctccagctggtaagggtcctcactggggagggcacgaagctggcgggacaacactgaggagacaaagaatcttcagaggccaacccagacctctccccttgccctgtctgagagctatccttaagcctcttacctccatgctcagctggcaggctcccccttgtgtcagaggagtacatagcaggtacaaggaggaggcagaaggagactagtaggacctagagcacaggaaaaaggagatgaagaagggctctggattgccctgtccccaccaactgagaaaaggatttctcccctcatcaccatcctcaccaagatgcaggtgctgctgctgctggttttgtttgatatctcaatcaccatggcctggagtttcctcagttgatctagaagggacctagaggaagagaggggccaatagtgagcatcccctggcctagcatcctgagacacagtgaaactcctgttcaggccacctcctccatctctgcactggatcctctctcttacttttcattctatttttgcaaacgacttcttcctctctggacaaaatgcctgaagttcctcattaaaacaacaacaacaacaaaaagcaaaaacaaaacaaaacaaaaaaactctgccaggacttaacctcctttgcgaatatcatcagtcgttccccactgtctgatcagctatgcacataatcctcaccaggcattttctatgttctctaccttctgtcccagctcatgtgtgttaagagttccagcccaagatgactatgctggactagtcctcttgcctaggatgctttctctctgcctagaatgctttcccaacccaaccccagaatcctaactactatgaaagcccatgacgtctttcttaccccctttctttttcttggtacttaacttattcttagttacttgtaaatgtattcctcactactgggagcttcttggaatcagagacctagtgaaggcagctgcccagttagaaatcaagtgtagggcaggggaaagagtgagaaagcattaaatgaggggcataggaagggaatggtttggagggatacttacaaattctgttcctccagaagctgtactttgttctgaagctccatattctgggctgtgtatttcaagaccctgggggaaataacaaagatacggggatatggcctgtatcctcccttcaaaaacctaatacttacaacagagtccctctccctttcatacctgctctctaaacccccaacatacaccttctttttcctgcggctctcttgagcagatcttttatttcgaatcttcctccgcacacgtttcagaatttgttcctctgtctgaaaggaaacagggaaagggatatcattagaggaactctagaaaaaggagttgaaacgcaactgagatcaatctctttccaatacagaaatcccttctacagcttccctgaccaacaggcattcagattctttctgaatgcctccacggaccaggtgttaaccctaacaagccagaccattttaaactattaaaaaaaaaactggtcgggcagtattcaggcgacgtggctcatgcctgtaatcccaacactttggggagctaagacaggaggaccggttgagcccaggagtttgagaccagcctgagcaacatagtgagaccttgtctctactaaaaataaaaaattagccgggtgtggtggcacatgcctgtggtccctgctactcaggagactgaggaaggaggatcacttgagcctgagaggttgaagctgtagtgagccatgatctcgccactattctccaacctgggcaataaagcaagaacctgtcttcaaacaagcaaataaaaacttccttatcctgaaccaacagctgcctccttataatttctatccgttggacttacctagtatctctggggccaaatagaataaaccctgtttagctattttaaggcacttaacatttcctcagagcttaaagaaaaaaaaaaagacaaaatttttaactcatcttctcaggatagactgcatcctcttagtatctgtcaaagatgtgctctagccagtatcaaggaaagcaagagagtgacttgtagagacaataactctattgctacagtttccaaatcccatgaactttcttagtagccacatcacactgctgactcatcttgtactttgaagaaattaaaattcttcactttgggaggccaaggtgggtagatcacttgagcccaggagttcgagaccagcctggcaacaaggcaaaaccccatttctactaaaaataccaaaaaaaaaattgccgggcagggtagtgtgcacctgtagtctcagctactcgggaggctgaggtgggagaatcacctaagcccagaaagtcaaggctgcagtgagccatgatcacatcagtgcactccagcctgggcaacagagcaagaccttgtcaaaaaatatatatatattcctgtaacctttctattaatgagcactgatttcatcatagtaccccagtactctgcttgtgaagttgccactcattgcttaaaactgaaaactaaggattttacatttattcatgtactgcttagtccaaccctgttgaactctctaaacagttctaccattcagcaagaggtggattactatgaagccaacgaagtgtcaaggcccttcacttacacagtcctttccaaggcccaatactaatgttgcactgataattttgagttatttttttaacagaacaccaaaatttgtataagcccaacaaaaacgaggatctgcccttgcatctggcatattgtgtacctgcctcaacttcctattagcaataaatctactaagtttctcacctcaatccttttttaaagttattgatataaagttaacagaatttgcctacttgggacttttaatcccttttcagcctttgttcaaccaatgagagtcttaccttagtgagaggaagtgtctcaggcagaataagcccctccttctccaatagactcttctcctcatctgtcagtactagcctagcaatctcctagggtaacaagaaagtggacggcagttgcatggggatgtcagagaggaatggggaatcctgcccccacctggggaatgtgagagtaatctcctgaaaatcaagtcaagtacctgctctgccagctcctccatatgctgtggagtcatctgggtcccctcttttctacagctctcactctctgcaaaagggaaagtatgaatagccaggcccatgaaccctgtcctccccgcaaacttatttcagactcacctagatccatagagacagtttcccgtgggagggagtaggtgtggtcatggtggacaaggcaggggttggaggagctgagaatgttcaacgacgctgggggactcagcagggagcacagcaaatcatctacttcccagtcgctcggtacctgcgcagggttccaatgaacaggccttgaccttatcaccatcacctgacttcatggacatcccacgctttccccagtcagaaccccaacctacctcagaaagcggcagcgcccagtccagtggggccctcacggcctcatcgggtgccgtccccaaatctccactttcctctagcaggaaggccagcaggtcttggtcaccagcatccaattccagctccatttgggacaactacggaaagggtgggccaccgggccccaacgtccgaagcccagacacgagccccaggccagctgtaggcctcgggcacctatccactgtccctctacggccgggattccccgccggcggctttccatagccctctccggacccgcctcccaggctcaattctcctcagcctccaacgcagcgaaagtgacgcaccccaccccgtggcactgtgggacttggagttccctccaactgagaagaggcttgggtgcagcgccacgtcccaggggctatgcaaatgtaggggacggccctgctgccgcctcgcaccccgagggcgggggttccggggctccggctccgccttctaccccaagctagaaaaaggaagagttctagcctgaaagggaactcgggcgtcgtcctggcgtcctctccggattgcg

SEQ ID NO: 607 - DNA, 3118 bp, Homo sapiens
gaagggagggcgaggccggagcccgagggcgacccgagaagcggcggggcggcgggccggcgggcggggcgcagagccaggcagcgcaggtaggccagaccgggccgggcgggggccttagggtggggccgcggggcctggccccggggcgggcgggccctgcctctcttgcgtgtccggttcgggtcctattagttggagaggtcagcgtccagcgcatctcggcttgagctcggcgtgaagtaggccgtcttggggaagacaggcctttcctgggagcagtcctatgtctgggataggctttggggagcgtgaggagtcgggtggcagcggggcgcagggcggggacgggctttggtgttagctgatagcgggcatgtgggtaggaaagctttgggtgagttggggattaggtggggtccgtttaggaatcaagggtcgctataggagttaaaagctggggttaaaacttaagagttagtgtgagtcaggtccgttttagataggtaaggtttagattacggtcattatcttgtttgctgggatggccatcatacgtcataatttgagttcagggtcaggttaagggtcaacaaacaacaggaatcaggttagagcttgtttgagggattaaagaatgttggcatggtcggtgttaaggataaacagtgaaagcgtgagttaggaatcaaattataaatgaactttaggcttaggggtcaacatttagggttaacatcaggggatttggtgctaaaggcaaaacttagatcagtttcagggatcagggattggatatgagtctgtgctaggaaagggatgaatgtccaagccggtactgggaatcaggaaacaaattagaggtggggttaatgttaggaatttggggcagctttaggggttgtggtttgaggctagcatagttgaccttgagcagataaaatttaagaggttggcagtaggtaaatgcccttcttttgtagggaaatcctttattcctatgtagttacaggggcttctttttacccagagagataaactaatttcaggctagcgttctggctttagctagaattgcaggcatctgggattccagcttctttattccattctctaagcccaaggcccttgctgtggccaccacagttaggggacagagattctggactgtgttgtttacagacaacataggtgggaaatagggacccaggatgtacaaggcctagtcacaagttggggactgcctagggaagaaggagctgatgactatgggggaagctaaccaaggaatcactgttgccatgggagaagggaataactgaatcccctgaaagtttagccctgcttctcccacttcacttgttctcttggtattaagccctcctctccaactctcatccctgactctgcatttcacacccatcctgcctatccccttacaaaatacttcccttgcctttaactctcccatgctcatcttatcatccgttcccatccttagttctacctccctcaccaacctttaatccgcacatcctacctgaatttaccctcatcaaaacctgagctttcccatcattttaaattactctcctaccattttcacccagtcatgtacctacattccacctggtcatctgctgaataccctactcccatcccctgctgtgtgtcaccccctggatctaagcctcttttaatttcttggaccatttgtagatccccttcccccactccccaacagaaaagaggaaacgagacccaaagaggaaactgggtcttgctgatcccacgcccagccaggccactgaccacacccccacttcactcccagcctgaccctgccactgaccacagcactatcctctactcagcctgacccagccactggctgtaccccatcccccatcccagctccagctttacttagacattgccaatgtcccttcactttcccacccccaccccagtctgatttagtgactgaccacaggcccagctcttctcaacctcctatagcctgacctggcctctgacctcaccccatcattccctgacttagccaccatccatgtaatcattccccttcccccaacctgatgcagtgactggtcatatatgtatcttatgtatatgtatttttccaaacaccatcatcaccagcattctttttctacaccctgtcttctcatcctttttctacaccctgtcttccccattcccagcctgatgcagtcactaacccaaccccatctgcccctagtggctactaatcatatactcataccctttttccccacagcctaaccacatcccgtaaccacagcctcatcctcacattctctgcccaacctgatcctttcccctcttcccaattcgtcgcctaaactcaagctgccccagccgctaaagtggctgctgatgataggaagctgtgggactctaacctgtctaccttagtagttattaggtcctgtcatttctacctccccaaacttgttctgagtgacatcttcctcaatgccattccaactccggcttcattacctttaatttgtactaatacagtgtccttctaactaatctccaaggtaactgccagagttatttttctaaaatccagttccggttatgtctcttctctgctcaaagactcccttggcttccttttgtcctccaataagtaaaattcctcatacccctctccagtcttcctctgcctttccatcctaaccctgacttccccaccactgctcccttgcaggtacccctgtgcttcaacagcctgcctgctcacttccctgaatgctcctccacgatttactgcttctccatctttgcttatgctatttctctgcctggagtgaaaactacccctgacacatctccagctggctggcgtagtggagaaagcttgggctttgcagtcagaaacctgggttcggatcctggcttcacaacttattatttggagaagtatttgaacaagtatttaacatctttgagtctgttttctgatctgtaaaaatggaaataatgacacctactgtaaggattaaatgaaattatgtatacaatgcaagtgacatagtcaataaatggcagatcactattgttt

SEQ ID NO: 608 - DNA, 10231 bp, Homo sapiens
ttttttttttttttttttttttttttttggagacagggtctccctctgtcacccaggctggagtgcagtgcagtgatgcaatctcggctcactggagcctcagcctcccaggttccagtgattctcccatcccagcctccagagtagctgggattacaggaacgcgccaccacacccagctaatttttgtatttttagagacagggtttcaccatgttggccaggctggtctcaaactcctggtctcaagcaatctgcctgcctcggcctccccaaatgttgggattacaggtgtgagccactgtgcccagtccatcatctattgtctgtaataatttagaaatctggcaccaggattatgaaattcactatacagtgtgtggcataacaccaagcttaaatggtcactcagtggacttcacaataatggccactttatgcttctggatgcaaaacgttgggagagtttgaagtggatatgaatttgagaatgcgttttcttgtaggaaaagtaatggaaacataagcatctttttctaatcacaggaaaggttaaggctttggtgaaagcaagcataactgagtttaaaaacagtctagaataagaaaagggtaatagaagaggaaggaaggcagaagtggaccatgcagaataaacaatcaagcctagcttttttaaaaacctgaggtcttactaaagagaaaggaggaaaaacggaagatttcaacataagagtgttaaaggtggaaaagagccagaaaggactgtgggcttaaaaaaaaaaaatcagtgaagcagtagtggtgtatgttggcaaagagaagtgtagagttgagaggagggagagaatttatagtagaggaagtcggtgtgaagttttcctctcaagatgcccagcagagcaaagaaggaatgaaggcaaaggccactgggaatagagtagggctggggctaaaacagcacgggagagtgcaacagggcccaaagtaagacattttcttttcttttcttttttttttcattaattgacccagatttgcttgtttgggaccaaaggcaatgcagagtttagggatctttataatttataaagtaatcacctttggcccaacataacacagatcataaggatcatggcagaattcgtctctgagacaagtacaaaataccattttagagttgattttagaagagaagtcagactaataaattgctgtgttgtagaaatactatggtgaattaaacagctttaactttttctatcagccacaggataaatacagaaactgtataattacatacacatccacagaagatagtagcctcatatgctaaaattgtgagttgtttgtctgtatactgtagtccaaagctcccattccaagaaatgttttatttggttcaaaatataaagggcaggttagagggctacacagaaaaaaggctaaaaataaagacagtaaaatgagggagaggaaaagtggaagtgcagcactactgatccagaaaaactgaggcatcagccacaaagaattcaatcaagtcagtgaggggcaaatggcacaaaagccaaacaagaaaaaggctgaataccatattaccaatctgagagcctcacttttggttttaagtcaaatattgaattagattgtgcaacttttctatttttatttttttatttttaaaaatccaccaaaattacttaaatcatttgacagagtcatacaattttaaatgactataaaaatgtgcagatcagtgccaaattttttggcaaaggctgaatggcagacagtaatccaagacgcagacaaccttgcttttaagccatccgttacacagagaccagcaggctcccttctacctgtgagaccaaataatcccaaaatgtaaccaaataatcataactccccctactcctaaaacctacccttcacccttcactgtctacgtcagcctctggacagacctgatgcctggggtttggccatttccgccttcccaccctgtgttggtctccctcctccctcctcaggtccctcagttctcccaggcctaacttggcgtgcttccttcctctctcaccccaatcaatccggctctccttccctttctgggttacgccacctgcccgactcccggtttccccctcgggggcccctccttgccctggggtctgctctcggcccgccaagttctcccaggggatccctccccacctgcctccatacagtcagactgtgttcagtgtccgtttcgcgcccgtagcgacaccacgacagaagcccactaagtgaccctctgctcccagaaaccctcctggctcctccagaccctccggggctctggcccgcagctcccctctccctccggcggcgggggtcggctgtgactcaccagagggccagcggccggggttggggtgggggggccggaatgctctcacttcctctccgcgcacctgccccgaggctggagcgccgcccggccgggcctccggcggatgttttccttgttcccaagcgtgtagtgcgcgccagccgccccctccgggacctgcgcgccagccaccgcgcccccaggacccagcgggcctggtcctcaccactcaccccctccccagcaggcacgcatgcgggctcgacccacacctctgcaccgccccccaacttctgggagaggactcctggctcagcccagcctctagctttccagaagcccctatatgcctacctcatcttcgttataggcgatgaaccttcacttctgtccccgtttccgcacacgcaccaatccccactggcgatcccttccccttcggcatcacccccaccttcatgcgccccagctccccactcacatccgccccctattgggctggctctagcttgcaagagcagaaggtggcccagggcccagccttccaggatgtcccctggaccccctctctgggaaaggcggcagagctactggccactgacaagacctttgggccctcgtgctagacaggccttcgaatccacctgctccagcccagagagcaggcccaggccgtgcctcccacaccgcagccgacctcagagcaccctgcctcaactgtgagttttttcttggcaatcctctgaaacggaaagggtatcagtcctgactagggcgaacgtgaggtccattctgcatctccatccaccttagctgtctccttggaaaaggacagcaagggagtttgaggtgcactgacacagtcatttctgaacagtgaagagatgacaggtagggtggtcccccttgaaaagtcagccagaagtagctgtatctgatgcactaggtggcagggagtgagtcttggagtaaatgggactgaaaacgtagaaaaaccaaataaatgccaaagagactatccctatggagaatacctagaacatgggtctttgaagtgtggaaaaatgaaagaaatccaatttgaccagggcctttagtgccaaagagatggctagcaggagagtggtgagaaaggagaactggagagttcacatgagcggaaataggaagaaatggatccaaatccaagtgagaaaaagcaggagacttaaagttagcctggcaggatgatgagaaaaggacatcttgtcctagggtagaggcgagggtgcagatctgggggaagaaggcttattgggaacagtttctcaaactagacattcagaagtcaatacaagggccaaaaccaaaatgttcctggaggtacctgtttttgaaagaggtgggaaaggtgacatggattaggggtctccatcccccaggccacaggccagtaccagtctgtggcctgttaggaagcgggagcacaaagcaggaggtgggcggcaggcgagtgagcattaccgcctgagctcctcctcctggcagatcagcagaggcattagattctcacaggagtgcaaaccccactgtgaactccgcatgcaagggatctagattgcacactccttatgagaatctaatgcctgatgatctgagatgaaacagtttcatcccaaaatcatctccccgctgctatccccctccatccactggtggaaaaattgttttccacaaaaccggtccctggtaccaaaaaggttggggactgctgacaaggagtatgagtgtgaaaggtgcagaggtctatgccaggagacagccatccccaatagaagccctcagctatgcacaaactgcttaatgtcattcaaagaaaataatgtcgcccattttgcctcagagctttagccccaatcacagcaactgctatttcctgacgcttacgcaccagagatggtgataagagcactgcacgcattatctcagtaatcctcataacagcccaatgagttggcattactatccccaatttatagatgaggaaacaggctcagagaggtgaagtaatctgaccaggttacatagctaagtggagtcaggatctgaatccaagaagactgtctctacagcccatgctctcaataatccatcctgggctcctccagaacctgtgggaaactcagaggatgccaaatgataaattcctaaaaacctcactccattatatatgggaggaaagagaggacacctctgtgaacctggagtgattcatcccatcagggcacttagagatgctcctctttgaaaggggaaagaaccatccccagatgtggggtgatcccacatctgctgtatgtttgaaggtgataagcaatggacagttcacctctggaatgcctgaggaaaagagaccctccccaccatctctgaggggcagccctatttcttggatacattagggaaaccctgccctaggatctgagggaaacacagtctccactccaggtgcctgctcactctcctggagcttctggccgtcgcaccctattgcagctcctgggtttggctggggcacaggattaaccatccccaggaaatgcctccctccggtccaggcagggatcccagcatacacacccctggtggtggcagtgggggagaaagggggaaggtggaatgcttccttctctccaggtcagggaagagatctggggaccacctgggggccctcgcccctcctgcctccttgctggggaagtgcccagtccagtgccccctccatggccacctccctccctctagctgtgccggggcatgaatcagctctcacagcttgttaaagctagacctcttgttttcatgccctcacctcaggaaacagagttacaacttttccagctctactcagcagggggccagggtcctcactttataaacatccccagcctgtgagagcagagggcagggagatagtgtgagacaggagcccaggggagaaagacagaaactaagactcaaggagcaacgcaaagcaaagtcaaggagtcaagaccagagtagctgagcagaggccaagaagggtctgagagggctgtgcagcagcaatggccctaaggatgctctgggctggacaggccaaggggatcctaggaggctgggggatcatctgcttggtgatgtctctactcctccagcacccaggagtctacagcaagtgctacttccaagctcaaggtaaagtggggtgaagcgttaggaatggaggagcagcagagagggcacagggaggatggggccttacagatgatcccgtgtcaaaatacccaggcttcctccagctgtgaaacaggaaagacaaactaaatacggggatagtgcgtacttactgtctccaccccagaccagaagagcctctgcctctcatcagcactcctacacctactaacatttcccgttcttccctagccccctgtcactatgaggggaaatattttaccctgggtgagtcttggctccgcaaggactgtttccattgcacctgtctgcatcctgttggcgtgggctgctgtgacacgtgagtgaccaaagatggccagagagaatgactctgatatgagtgactgagggatgaccagggagtgactagattgctgtgatgtaagaatgaacagaagagcaatacaagatgggccaaacctgaagggaccaacactagtgtgaaagataaggcttcaggctataaatcaggggaggttggggtggacctggagagaaaatactcctgttataaaacaaaaaggcccacatatggtaggtgacagcttagttaggaggaccaaggggccactgaaaggggctctgtggggggaaaactgtgagagagggaacatgtgggcagggataaaggcagcctttcactgtgctgactccttcccctatccttggttccccaggtcccagcatcccatcgacttcccggctgggtgtgaggtacgtcaggaggcaggaacctgccagttctccttggtgcaaaaatctgaccctcggctgccctgcaaagggggagggcctgacccagaatggggctcagccaacacccctgttcctggggctcctgctccccactccagctaaactcaactgatcatccatctgctgactgctcactgctgctgccacttccagggaaaccactagcagctgccaatgtattctgaacaaataaattaatgctatagctgaaagcccgactctcactgtccacgacattggaccccaggtggaaaaagtgggtcccattagagtccaggtgctgagttctcagtatccggaaggaactagcaccagggtgggccagtttcagatggttatggtgctggtgctggggcctggggcagcatatgaggccagggtggggctagtaggcagcaccttgatgggcaggtcccagctgaaggtgtctacaggtacttgctcaggtcctgtccaggtggtaggttcgggctgttccacagggggtaggagtaccaatcctggttctcgggacgttacaaattcaaaatgcaatctccacttcaaggacactatggaagaaaaagattaaggtagaagcatcagaagctagcaggagtaaaagccaatgacaggatatagttagtgaatgagaagaaaacaatctgtgttcaggaagacagggaaaagtcacagggcagggagctgtgattaagggtttttctgaagcaatgggtactaccacagatgtgagctgaagatagcagtattaagtacctaataacctaagagtgaggcagtcaagtctaggtagcatgaagtaatcaaaaatcagtgtatcacagggtcctagtaggtaggtgtggggaaggagttctatcaagctgttaggagtttaggggtcagtgcatctaagaaacaggaagaggttgaaggtctgagaaactgttccgggtcagaggctagacgtgggtatgtctgggagtgtgtataaggaatcaggatccattacaccctcccttagcacagcattttactgtccccctctcccttctccagtaacagtgagggtctcaccaatggctgtacagaagcctggggtggagctgagagggattgggagggagaagctggttctagttgtatgtaggcaggattcctggtgccgggcgtgagtcacatgtgacacagaggggacaccccctgccccacgtcgccgctggtactcaggctgtacacgctcctcggtctgtaagctgactgaaaactgggagcaagagacaggtgtgtgctaacaggaagtgctgtctgtaggtgagaggacagcccaacctcaagctgttttacaaagggaccctggatgaccccactatccccttctacatgccacccctctttatacaggccttccaccctagcccttcaaccccagcaccccagcaggtaagaagctctgctcccttcttacctgcaaacaagctacggttccttcccctaagtttaaggtccccaccacgtcctcgccaagtctgtacacagatttgaagatgccaaacgtcccaactttccctcggccatcactgatattgtatagatctggggagaataggacactataagcctggagtctacatactggataacgtctaggactgggcaccacaggccaaaagatggggcttttctttaaaattggaggtgtcaggtatcagtggatccacagaagtgtgtggtggttaggagactgtctctgagatgggaaaacaatgaggggaaggatggggtaggacaattctgaaagaattctcacggaggctgcggcaggatgtggcagccattaggcgttccccagccagctcagctagccatgaatctttcttcccaccttcatcctcctccaagaatggactggatggggctacagcctcatcctggggaaaccggacatcctgaaggcctagagaaagaatgagtggagaggtaatgctgagagggaacggagatgagagtagaggttagggttttagattctaacatgagatggctaaaggtaaggggtgccagggctgaggtttacatctctatctccagaaccctccctcccttcccaactccctagcactgtcactgagaccaggaagtttccctgcagtccctcttgcaagccctctaagacaatttctgctttggcatcgcccttccccagcccttccctccaggagcccttgcttaccagtcagcacaagaaccctcagagggactctgagtaaagtgataggggagttgacacgctggcagccaatggtcagtttgtagacgtacttgactgactgaccccgaaaggagggtggtccctctatgggcagcacttcactgtaggagtctggttgggaagtagttgtcaggacagccagaggcaccagaggagtcctccctccaggagacttagaaggcaattcagggatggggacaatcactcacatgatttggactctccaggatcaagcctcaggtcacagaatagaattttcggtggagtagaaaggatacactggcccctctcacctgaaaaaggtaaaaatgactaatttaatgacccattgtccagtactgaacaagactagcacggcaagtggagatagtgaaaggctgccaggccctccgtccctgctgtgaaatgggaatagtcttctacccctaaagcaatagtcatgctccccaacatccccagcatgacagggactataagaacaagaacaattaacaacttcacccatgggtgacaatgcctccacacacaccctccgcaccccccctctcccaggcaaatgcccctctctaacctcggtgtggcagaaagacagtctggctgtcgggctggacatctggctgactagagtcaggaggaggcagtgctactcgactctcactggcatggaactggcagtggatttgggcactggcccaggccagggcctcactgtgggaaaaggaaaaggaggcatcagaggtagttcctgacctcacaaatgctttcccaagctccctatcacaccatcttaaccaacaaggttagatggctgtcctagtgatcaggaaatccacaatcccaaagagaaaccattaaataaagagtagcagactgtgcgtaaaaaggggaacgggggaggggaaggaaagcgtacagctatgtcatccacatcttctgttaaagagccctctcctacaatgacagcacagtgagcaagaggaggtggtgtcgctacaggacaacctgagctctgcctcagccccagagataatctggcttcttcccagaagggccaccaccttcagtgccagcatccccacctggatgcagaagtggccgtgggcggaagggggttggtgacggtcactacacactccagcgcctccccagccaaaaatacaggaccccggctgagctctgctaccacttcaatcatggcagctccggaatcagatctagaaggaaacaaggcggggcggaggtcagcaccttgacagggaggggcgttgcggtgagcacctagggctgagggctgaggacaggggtggtcagcaccgtggtgcccgagggagctcctggatataggaggggtaggcgggtgggagggaggcgactgaagactcagtactgcccagggggaggacatcgctctgggccctagaccccagcccctgtgcgacgggttcttctccctgggcacccccgcggagttcccaaactggcctccgctccccctttcctcaaagttccacgtcccagcccaagatcaccgccgctagtcacctcgcatagtcgacactagggatcggcacccctaggcctcatct

SEQ ID NO: 609 - DNA, 7328 bp, Homo sapiens
aaccattccacatttgtggggaagatctggctcactgttctgattgtcttccggatcgtccttacagctgtaggaggagaatccatctattacgatgagcaaagcaaatttgtgtgcaacacagaacagccgggctgtgagaatgtctgttatgatgcgtttgcacctctctcccatgtacgcttctgggtgttccagatcatcctggtggcaactccctctgtgatgtacctgggctatgctatccacaagattgccaaaatggagcacggtgaagcagacaagaaggcagctcggagcaagccctatgcaatgcgctggaaacaacaccgggctctggaagaaacggaggaggacaacgaagaggatcctatgatgtatccagagatggagttagaaagtgataaggaaaataaagagcagagccaacccaaacctaagcatgatggccgacgacggattcgggaagatgggctcatgaaaatctatgtgctgcagttgctggcaaggaccgtgtttgaggtgggttttctgatagggcagtattttctgtatggcttccaagtccacccgttttatgtgtgcagcagacttccttgtcctcataagatagactgctttatttctagacccactgaaaagaccatcttccttctgataatgtatggtgttacaggcctttgcctcttgcttaacatttgggagatgcttcatttagggtttgggaccattcgagactcactaaacagtaaaaggagggaacttgaggatccgggtgcttataattatcctttcacttggaatacaccatctgctccccctggctataacattgctgtcaaaccagatcaaatccagtacaccgaactgtccaatgctaagatcgcctacaagcaaaacaaggccaacacagcccaggaacagcagtatggcagccatgaggagaacctcccagctgacctggaggctctgcagcgggagatcaggatggctcaggaacgcttggatctggcagttcaggcctacagtcaccaaaacaaccctcatggtccccgggagaagaaggccaaagtggggtccaaagctgggtccaacaaaagcactgccagtagcaaatcaggggatgggaagacctccgtctggatttaatcctggcgggcttaaaacctgtgcttttcatagtttatggtaagcagcagctcactgaataatgacttccattgagtaaacatttggctctggttatcttcagggatgctgttggctcatgatccaagctcaggggactctggaggcggggctgggctgagggagagaaagggaaacacagtgttcccaggcacatgttcttagcaataatacagttgcagaactttacatttgtgtcttccagatctggagaagaacagacatatttaaatcattcttgttgaacagtttttgtatgtacagtattatggtacttttttttttttagtatgagaactttttttgtatttgtacattgaactgctgtagttatacttttatattaaaggggaaaaagtccttataaataatgcctattaggctagtgctattactttgttcagcaaattctaccctggctttagagtttttaatagatgctacacctaataaaagtgcctctcatattgcaggaacgatttcagatgtgtaaggagactgaagaggagataccagtttttagtcttggaaagcaagttcacagtagaaggaggttgagatctttcttttatgtgagaaatctttgaatctcattcatgcgatcagagttgtagccaatttttgaaaaccttattttcaaaggaaataaatgattcactgtaggattcctttaaatatcaagcatcaccagtatatgctttgatggtatatgtatataacttaaagttctttcaaaagcctgatacagaaacgtgtccccagtttggtagcaatgtggaaaacctggctagagatgatatggagctgtccctcagaaagcaaagccatgcctggaatccctaataggctgcttagttgtgaacctgtttgatttgccttaagcctctatccagaaacctgcccgcttccgtctggttaagaagccagtggtggatattttctttgttaacattagaaatgcaaacattcccttgtcaaccaagaatactcaaagctacttgtattggaaatggcagaaggcctaaatccaaatttcttattttttataatttaccatagaagttttgtgattaaattcttacttctgccagtggaggtttatgcctgaaaggtcatggggtcctgtctgtaaatagacctaaagagaagtgcagtatttattctttgtaggcataatgtgtttgtcactgacaagcattcatgttcatcccactagtcttttattgcagtcttttattgtcattttcagccttatgttggagagctttgctttctcatcatgttcacattgtcttaagttttgtgagcttctgagaaagagcttggtaaaggtttaaaggggactttgttccaccagggagcattttatttgggcgtctcacccttttctaatgaaagctgttgtaagccacctctgacttggaaattctgaaagtatgaatattttttatatcttaattgtaaaatgccagttctccattatttagatgaatagtagaacactgcaccctttgtgcagtgtttttgtttctctactgcattcctacccccaccaaaaaaaagaaacttaaggaaatttttttttgagacagggtctccctctttcacccaggctggagtgcagcagcatgatctcagctcactgcagcctctgcctcccaggctcaagcaatcattccacctcagcctcttgattagctgggactacaggcatgtgccaccatactcggctaattctgttttaaaaattttttttgtagagatgaggtctcactatgttacccaggctggtctcgaacttttgggttcaagtgatcctcccgcctcagcctctcaaagtgttagtattataggtgtgagccaccatgcccagcctagaaaatttaaccttatcttttagccattcatttacttttatttgcttttttaaaaaaaaatctttaaattttagcctagagaagcacctcaggaactctaaacatcttaggcaaaaattaaactcaggtgagactgaaggagaaatttcagaaatacacatgtacctcatgggtaattaatagacatgcacagtttccttcaaatcaaatgtttaataaggaaattcatataattccaagaaaacaggcaaaatttggaatacataagcctagctaagataaagaactaccagttaattcttaacatcactggagcttccagcaggttttttaattgaaggacaaaaagtgtccatacatttgtgttatctcttcagagcctgagggagaagagagtggctttgcccagtggaaaggctggggatttgagaatgatacagggggaaggagtcaagcagaaatgccaggaagaaccaggcaaagacatttggcgccagaagcatccacttaatttctgtgaagagtgcccctggtgtttcatcttggcctgttttgatgagaatgttatcttttgtgtctggataacgcgtcagcttcttaaagtacatataaagatattctgtcacctccccacatgcacacacttttaaaatctatttttattctcttgctaaagttgtaattatgtcaagaattttccagctctaactgccttcttagtacatgtctttctgcctttgaagcatatgagtttgccaaagtcattctcccctaatgacatattgtggacttacattaagaaaatgggccaggcgcggtggctcacacctgtaatcccagcactttaggaggcccaggcgggtggattacctgaggtcaggagttcaagaccagactggtcaacatggtgaaactccatctctactaaaaatacagaaattagccaggagtgctgggtggacgcctgcaatcccagctacttgggaggttgaggcaggagaattgcttgaacccaggaggcagaggttgcagtgagctgagatcataccattgcactccagcctgcaagacagagtgaaactcttgtctcaaaaaaaaaaaaagaaaaaaagaaagtgagcctgttgatgtctagctaacccattggtggagtctgcattgaatctgtaagaatattgttctggatcatgcaggtgggatttgtataaaaagcctgtccaacatttagttctcactcgcatcagaatcatactgttttgaattgccatataagacatgctccatcatgacacttgcttctcctccaaatacaagttgagtgcttagtccttcacctgctagaatcaggatacaatcaacatgattatgttccttaacacacttggatttatgcagatgtggtgtgtcctttgctcttttttttcttaagacagagtcttgctcttgtcgctcaggctggagtgcagtggtgtgatttcggctcactgcaacctccgcctcctgggttcaagcgattctcctgcctcagcctcccgagtagctgggattacaggcaccaccaccataccaggctgattttttttgtatttttaatatagacagggcttcatcatgttggccaggctggcaggctggtctcgaactcctcacctcgtgatccgcccacctcagcttcccaaagtgctgtgattacaggcgtgagccaccgcgcctggcctgctcttaaaacccgttattcagaagatttgtaaaagaaataggctttttttttttttttggttaattcaaacgaggggaaaattagatagcattttcccctaaagaaatgttaatgttcattttgtggctttgttttcaagtttcaggagccatgtacatctcagaagtgttacgaagtgattagaaaaggcctctggtaaaagaccttcaaggaccaaccattattattggtcacttgtttgaacttggcgcttaaaaaaaaagttggactgtgatgctttggtgctctttatcacagacatcagtgatggtctgaaacactctctagcagtttatacgaagaatggacttacatgttatcagttacactcatgatttactcgttcagcttctacaagtccatactttatgctgtctcatttaagagacagtccacttctgaaaataaaatcgatagttgatgatacatttttggctagccagctttctgtaaaaggcaagtatgttagacatgcacagtttccttcaaatcaaatgtttaataaggtacttcaagaaacgcctttttaaaaatcaaaggttttggccaggcatggtggctcacgcctgtaatcccagcactttgggaggccaaggtgggcgaatcacaaggtcaggagtttgagaccagcctggccaacatggtgaaaccccgtctctactaaaaataccaaaaattagccgggcgtggtggtgggtacctgtaatcccagctactcaggaggctgagatgagaatcacttgatcccaggaggtagaggttgcagtgagccgagattgcgccattgcacttcagcctgggcaacgagtgaaactctcaaaaaaaaattcatagtaataataaagtccctgcatgcagtttggaaataaaatttaaactcatttatgtgtaataaatatgtaataattcacagtcaccatcaaatgttggaatcattgaattgcatacttgtactcattccggccacatcatgaagtgtttaaagatttgtatttgctgttgtccctatgtagttctattgatgtttggttttgttttttggggtttgttttgagcccaggctagagtgcaatggcacaatctcaactcactacagcctggacctccttggctcaagcagtcctcccacttcagcctcccaagtagctggtctgcaagtgctcaccaccacacctggctaatttttgtattttttgtagagacagagctctcactatgttgcctagactggtctcaaactcctgggcccaagcaatcctcccatcacagcctccgaaggtgctgggattacaggcataagccactgtgcccagcctgtttttaataatgatattaagtgggtttggttcatgtgttattaatcagtgttaataatcgtacttttttttttttttaaaagaaaccatggtattctaaaatcaggagtccaaataaaagaaagttctcggctgtgcatggtggctaacacctgtaatcccagcactttgggaggctgaggtgggtggatcactagaggtcaggagtttgaaacaagcctggccaacatggtaaaaccccctctctactaaaaatacaaaaattagccgggcatggtggtgcacacctgtaatcccagctactcgggatgttgaggcatgagatttccttgaacctggaaggcagaggttgctgtgagccgagatcgcgccactgcactccagcctgggtgacagagtaagactgtcgccaaaaaagaggaaaaaagttatccagtgcagtttctacagagataaaagaagtaatagttctggctgggtgtggtggcttatgcctgtaatcccaacactttgggaggccaaggcaggtggatcacatgaggtcaggagttcgagaccagcctggccaacatggcaaaactgtctctactaaaaatataaaaattaggtatggtggcacgtgcctgtacttacagctacttgggaggctgaggcatgagatgacaatctcttgaacccaggaggcggaggttgcagtgagctgagattgcaccactgcactccagcttgggtgatggagtgagactcaaataaaaaaggtactagttctgcatttcagagttggcttgttgaaccaggctatatgcttccaagatttaaatgtttttctgtattatactctcaattgtgttttaaaaaaatctcttacagaaatctctacctcaggcactaagtgttatgacatgggtagcatattgatattgaaaacttagctaggacttccagccttttaagataatttaaatgtaaaattaaatggttaaccagcaatctaatgtcatgtggtgtgcagtttggatattgcatgaacagctaaggaatcacctgttctagtgccaaagatcactcattgctaattttgttctgtacagcttatgtaatattttcatggtggagacggactctgtgtgctcagggccttgtctctaggaagattttgtcaattccaaatacagttttgaagattca

SEQ ID NO: 610 - DNA, 1387 bp, Homo sapiens
  misc_feature (903)..(903): n equals a,t,g, or c
  misc_feature (1320)..(1322): n equals a,t,g, or c
gtttttagtcttggaaagcaagttcacagtagaaggaggttgagatctttcttttatgtgagaaatctttgaatctcattcatgcgatcagagttgtagccaatttttgaaaaccttattttcaaaggaaataaatgattcactgtaggattcctttaaatatcaagcatcaccagtatatgctttgatggtatatgtatataacttaaagttctttcaaaagcctgatacagaaacgtgtccccagtttggtagcaatgtggaaaacctggctagagatgatatggagctgtccctcagaaagcaaagccatgcctggaatccctaataggctgcttagttgtgaacctgtttgatttgccttaagcctctatccagaaacctgcccgcttccgtctggttaagaagccagtggtggatattttctttgttaacattagaaatgcaaacattcccttgtcaaccaagaatactcaaagctacttgtattggaaatggcagaaggcctaaatccaaatttcttattttttataatttaccatagaagttttgtgattaaattcttacttctgccagtggaggtttatgcctgaaaggtcatggggtcctgtctgtaaatagacctaaagagaagtgcagtatttattctttgtaggcataatgtgtttgtcactgacaagcattcatgttcatcccactagtcttttattgcagtcttttattgtcattttcagccttatgttggagagctttgctttctcatcatgttcacattgtcttaagttttgtgagcttctgagaaagagcttggtaaaggtttaaaggggactttgttccaccagggagcattttatttgggcgtctcacccttttctaatgaaagctgttgtaagccacctctgnacttggaaattctgaaagtatgaatattttttatatcttaattgtaaaatgccagttctccattatttagatgaatagtagaacactgcaccctttgtgcagtgtttttgtttctctactgcattcctacccccaccaaaaaaaagaaacttaaggaaatttttttttgagacagggtctccctctttcacccaggctggagtgcagcagcatgatctcagctcactgcagcctctgcctcccaggctcaagcaatcattccacctcagcctcttgattagctgggactacaggcatgtgccaccatactcggctaattctgttttaaaaattttttttgtagagatgaggtctcactatgttacccaggctggtctcgaacttttgggttcaagtgatcctcccgcctcagcctcnnnaagtgttagtattataggtgtgagccaccatgcccagcctagaaaatttaaccttatcttttagc

SEQ ID NO: 611 - DNA, 856 bp, Homo sapiens
agatgcttcatttagggtttgggaccattcgagactcactaaacagtaaaaggagggaacttgaggatccgggtgcttataattatcctttcacttggaatacaccatctgctccccctggctataacattgctgtcaaaccagatcaaatccagtacaccgaactgtccaatgctaagatcgcctacaagcaaaacaaggccaacacagcccaggaacagcagtatggcagccatgaggagaacctcccagctgacctggaggctctgcagcgggagatcaggatggctcaggaacgcttggatctggcagttcaggcctacagtcaccaaaacaaccctcatggtccccgggagaagaaggccaaagtggggtccaaagctgggtccaacaaaagcactgccagtagcaaatcaggggatgggaagacctccgtctggatttaatcctggcgggcttaaaacctgtgcttttcatagtttatggtaagcagcagctcactgaataatgacttccattgagtaaacatttggctctggttatcttcagggatgctgttggctcatgatccaagctcaggggactctggaggcggggctgggctgagggagagaaagggaaacacagtgttcccaggcacatgttcttagcaataatacagttgcagaactttacatttgtgtcttccagatctggagaagaacagacatatttaaatcattcttgttgaacagtttttgtatgtacagtattatggtacttttttttttttagtatgagaactttttttgtatttgtacattgaactgctgtagttatacttttatattaaaggggaaaaagtccttataaataa

SEQ ID NO: 612 - DNA, 971 bp, Homo sapiens
gaagcacctcaggaactctaaacatcttaggcaaaaattaaactcaggtgagactgaaggagaaatttcagaaatacacatgtacctcatgggtaattaatagacatgcacagtttccttcaaatcaaatgtttaataaggaaattcatataattccaagaaaacaggcaaaatttggaatacataagcctagctaagataaagaactaccagttaattcttaacatcactggagcttccagcaggttttttaattgaaggacaaaaagtgtccatacatttgtgttatctcttcagagcctgagggagaagagagtgctttgcccagtggaaaggctggggatttgagaatgatacagggggaaggagtcaagcagaaatgccaggaagaaccaggcaaagacatttggcgccagaagcatccacttaatttctgtgaagagtgcccctggtgtttcatcttggcctgttttgatgagaatgttatcttttgtgtctggataacgcgtcagcttcttaaagtacatataaagatattctgtcacctccccacatgcacacacttttaaaatctatttttattctcttgctaaagttgtaattatgtcaagaattttccagctctaactgccttcttagtacatgtctttctgcctttgaagcatatgagtttgccaaagtcattctcccctaatgacatattgtggacttacattaagaaaatgggccaggcgcggtggctcacacctgtaatcccagcactttaggaggcccaggcgggtggattacctgaggtcaggagttcaagaccagactggtcaacatggtgaaactccatctctactaaaaatacagaaattagccaggagtgctgggtggacgcctgcaatcccagctacttgggaggttgaggcaggagaattgcttgaacccaggaggcagaggttgcagtgagctgagatcataccatt

SEQ ID NO: 613 - DNA, 2971 bp, Homo sapiens
gggaaagtgacggcccaaacgccagggaggagccaggacctcgccctgagctagcgggaggtaacggcggggagtcctggggcggagaccgagcgctgggggcgtggtctccagcgggactgggcctctagcgggagtgggggcgggggcgggggcggggccagcctgggggcccagacgtggcgcagcgactcggaggttcgcctccagcttgcgcatcatctgcggccgggtcccgatgagcctcctgttgcctccgctggcgctgctgctgcttctcgcggcgcttgtggccccagccacagccgccactgcctaccggccggactggaaccgtctgagcggcctaacccgcgcccgggtagaggtgagtacgccggcctccagccccggcactatcgttccccaaccctgcggccccatgggagcaccgtccgtcccggccccaagaccacctcgaaccgcgagtctccctgctttccccctggcgccgggaccatccctcctgttccctagccccagatggccccagcatccaccgtggaagcctgagacaccgactttggggcctggaactccgaacccttccccagctccccctacccggtccgacagcggacacccagacacactgacgcagtctcctaactcttctcgtggcctatgactcccaatcctgtcccaacttcccatcccccatcacttcatgttttcctggaattcccccccgacccggttccagggctggaggctccagaaagtctcttttccttctcctggggggaaagaagactttctgggtgcctcctcccatatgcaggatccggggaagggggccaactcggaggggcaaccgagttgggaacttggttgccaacatttactctgcagcagcctcccatcctcccccaaccaggaaattcccgttcggagtccctgtcttgctatgtgactttgaccatcacagcccgcctctgagctttttgtcagctctgtctgacaaaagggtgtagaatggttgggtgccggtggtgcacgcctgtaatcccagcactttgggaggccaaggcaggaggattgcttgagcccaggagttcaagaccagcttgggggacatagtgagaccctgtctctaagaaaagggctgagggtaggatggaggagggctggagtgggtggtcctggggtctagactcctgctggatggtggcatctcctcagggaaggcagggaggagccctcccatcctcccatgtcagggaagcaaccacatggtctgtggggctgggccgcaggtggcaggcagggtgaggtctgcctgtgtagagtagggaccagatggtaggtgtctccaatgggggcccccagggccattctgaggtgtttccttctgctctgcctccactgtgagatttcagggatcaaaggccaagcccaggtctctactgcttaagaggagcagggtgatcatttcccctgggcattgggagtcagtccacagccagtaggatgtacaggccccaaggctggcaggcacactgtgggtctctggccttgctcttttcccctggtgtctctaggcctgagtctccccacctgtatacacagttcccccttctgcccacaagggtccagcatttccttcagaccttgggaactgctgatccggggataactcacagcccgacccaactcagggataaggaagtatggctttggggatgtgactggaataaacgtgaaggactcctgacctatcccattttatccccctccagacctgcgggggatgacagctgaaccgcctaaaggaggtgagtttgaaggaagaggtccctagctctgttccccctgagcctcttggggagtgggcaacatggtcccaatgactggggcggggaggggggaaggatccctaggctgagagtctagcctaggctgagagtctagcctgcacctgacttgctttatgacctcactgggcttcagtgtctcgtctgtacctcgagtagactgaggtcatggtctctgatgctctggttcctccccaggtgaaggctttcgtcacgcaggacattccattctagtatccttctgttctgggggaggggaaatgggatgggcacctgggagaatctccacgtaacttcagaaaggggtggcagatggttttcaactgacaagttgaattgattggtagtggctcccagaggattctgaggtggtctccatgttgggtgggcaagagagattgactagtgatgactgccacagaatggagaggagggccctttacttctttgaaccctaattttctcacgtataagcggagaccctggcccctcccgggcacagagtaagctctgagcaaaggaggcaatgctgttcccatcagtaaggctgcggaaaccaccacctccctctgcccaccaccccgctccttaacaccacctccagtcacaacctggtgatgaaacacctccctggggccgaccctgagctcgtgctgctgggccgccgctacgaggaactagaggtgaggccgtgggaggtgggctgggggcgaggccagaggcgaggcccagcctgctgaccccgcccctcctccgcctcagcgcatcccactcagtgaaatgacccgcgaagagatcaatgcgctagtgcaggagctcggcttctaccgcaaggcggcgcccgacgcgcaggtgccccccgagtacgtgtgggcgcccgcgaagcccccagaggaaacttcggaccacgctgacctgtaggtccgggggcgcggcggagctgggacctacctgcctgagtcctggagacagaatgaagcgctcagcatcccgggaatacttctcttgctgagagccgatgcccgtccccgggccagcagggatggggttggggaggttctcccaaccccactttcttccttccccagctccactaaattccctcctgccttaactga

SEQ ID NO: 614 - DNA, 23307 bp, Homo sapiens
tcgttgaaaaccaataatttatcaaaacgctgcgtgtgtatgtgggggggagggtgtcgcaacagacagggcagcggtgggcggacgcacaggcaggagacggtgcccggagagtgggggcggcagcttgccactggctggccatgcgggcgggcaggctagacattcttgccgcgcaggcgcagttcgtggcgtcgcaggtggttgtagagcgactgcacataggtgaagacacacttggggtcaggcttcttgcccatgatcatcatgtcgtccacctccaccaggggcacacagtccaccagcatcctgcagggagggggcacggggttggatgtcagcgccagacccgcctctcgtggcgcccctctaccccaaggtcttttttattgccgcattgcctgctggtctttcataaactccagacagggaaaagccttccaggaaggcaggaagcccctggcttcatctacccaagcctggaggcatctctcggggcgggggagcagagctaggcaggtggaggcggagatggcagaagagagccccatcccagtcaggcaggtcctgggtctgcttcctccaaccctggggaggtgctggctccaaaccctgcccatgttctccctggagaccaccttctgctcaccctcactggcacactccagttggtagaagcctctcagctcggcctttgcacccagatgggcttcatcactggccaatctttatctatggataggtctcactctagtggccctgtggtccaccgatgattgtctgctagctgcctgatctggtacttcctgttgagaggcccagggacccctattctttgacagggggtggggataaccctgctgctggagatggaggccagggaacgtgtgggcagcagaggggttctctaacccttatcacctgccttgggtagagcagaggaggcagatgaggatcccagccaataccaatggaccatctatgccatgctcggggggaccacccttctggccatccttcagaatgctagctgcccttcacagataaggaaactgagtcacagagcagaggagccatttgtttcaagccccatggcttagtaagtgcaggctaggccgcatgggacccaggcccccagttctgggtgttggcaaagccttttccccactctggagtgagtgggttgtgcctattaagcaactgacagctcccagagctctgaagctggagtctgctctctggctccttttcccctgtccctcaacccccagagcaagacctcttctgccttgatccctcctatctgccatacctgggacatagcaagcattcaatgttgctgaatgagtttcctatggcagggaaggcataatggcaacaattgctccttattctcaagacacctgagaacccaagaccacctcccatctcgtgcccttatggacaaactcagaactgtggtagggctgggcctacccccagctcacctggactccttcagagaagaaacctgggaggcagaacaccgaacacctctgttttagtccagactgtatccctaaccagttgtgggtgctagataaggcccttttctatgactgtttccccctctttagaacaggacagttattctctatctcatttgagaccttacaagaatttaggatgagtgagagggttctgggtctgctgctgatgtgccacgtgcccctagggtcatccctatcccagactgggcttgtttcccgagctgtaccatgatgcaaaggcagcctctctctgaagcttcttccagctgtggctatcgtcctggggatcccgaccgccctctccaacctggtgctccctcccgccccactcccttccctggagaccttataaagccattgtttacactggggctcagggctcagggctcaggctgccccagtgacaggccaaacaccaggcaacttgagcaacagcacggctgagtcacactttccaactggatcagggctgggctgggcccctctccctccaagctggcttgctgggcagcagctcctaagtccatatatgatctggagatagcaccaagcccatccgccactcatctgtgctccttctctgagtgtgtgtgtgcacatgtggactgccccccacaatggctccaggccctgaggggcatctgagtgtgcccctacctgtcactgactcacattccttcagccaatccccttgctccttctgggcctctattttcaatcctctctacaaaatgggcgggaacacagtgatggggcaaggaaaacagccactaagtggggagtttggagtctcagtttctggccccagctctgacctaaccatcttccctctccctcccacccccaggacagtcttagcccacgtctctctctgagctccttgtctgtaatggggtagttagtttaggatctgaattctttactttggtactgaggtgaggtgaccagagaggaaatgccacagctggcttaggatccagagtccccagccagaaacatcttcctgttgaactggtcctgctcctgagctccccactttggagtatggcaccaccaactccccagtgcccacacaggagcctggcagacttcttgaccttccctctccctctccaaaccagatctattgggaagcctgtctctctagctcttaagctattccagtcatctagtccatcccatctctcatccaagcctcatccgaggaaggtcctagaatgctatatccatcccttctctgtttggaaaccctttataactcctgttgtcctcaggaggaaggtcaaacttttttttttttttttttttttttgagatggagtctcgctctgtcacccaggctggagtgcagtggcatgatttcagctcattgcaaccttcgcctcctgggttcaagtgattctcctacctcagcctcctgagtcgctaggattacaggtgtgcgccacacgcctggctaatttttgtatttttagtagagatggggtttcaccatgttggtcaggctggtctcgaactcatgacctcgtgatctgcccaccttggcctcccaaagtgctgggattacaggcatgagccaccgtgctcggccagaaggtcaaacttctaactgtggccccctcctccctcatatccagactcaagtttcttcccttcctgatgtgctgtgctctccagctctcttgccctgctaagcctaggctgattcctctgcctggaactccctctccctcctttagcctgaacttgttcagatcccagcttagtttgcacttttttcagatggggggcccagacctgcagcctgggtcaggcatctcccctgggcttcccccatcacagtgctgcccacctgggtcatcactgcccatttagaatggtctcacctgctgggccctgaactgccagaagacagggctatgtctggctcctctggcttgactaaatgccccccttacttcccccacccgcctccctggaccctctctggccttgctgagcagattctggtgaaacggggcaggtggtagaggcggcgtttctcaccgtggggccccgagcaggggttaggactttttggtttttaccagccccttctggaccagacagcggtagaattcctggatgtacgtgtacacgcacttccagtcaggctctcgaagccgcaccatgtcctctgtatccaggagctgcgggcagtccgcatgggtcctggggagggtagggggccgggaaggggtgggggacgggggcaggaggccagggccccgggtggggaagagagggaagaggcagagaagagagaggggaggaaacagagacacacacacatacacacacacacacagagacatgagttcaattacgattccagtgctgcagtctgccagccccccgcatgcctcctccccactgtggacgtgccgctcactacccatcactaatggtgtgcaatgcagacaagggtgggggccaaaccagtcacaggtgcagagaactctaggggcaagcgggaacgcggggtgggggcgatggcgttggcaccaaggttggagaggagggctgtgccccggggagagggggtgagggaggcgtgagaggaggtggggggaggaggaagaggagaaggaggaggaggaagaaatttgagggaaaccagaaagagaaggggaaagaagggaagacagatggagaagggtgctgagggtgaggtgagcagacggggcaacgattccaaagtggagggcttgctgaggtcctatataagcctctggcagcactatataggctgggcgggcacggtgcccgggccaggagcctccttttggaatctccagccgggatcccgtgggagcaggaagctctggtgatagtgggaggagagcaggacagagaaagggagagagagggagaagggggcagagggaggatggaggggatatggacagggccacctggtgggctttggcccgggctggtaggccggcctgcggctccttcgttccggcgggcacctggcacgctcagcagcgggggggtggggatggagaaggacggggactctctggggaagggggtctcagccgctgactgacaatgtggctggcccgctccaggggttctcagggcaactgggcctggtcccgatgtccagccccagatgtgcagcaacattagcagggccagggcccacacttactccgcagatgagaaggccacctcgaagttctggcgtcggttctgagggctaagctgcccatagtcgaaggcctcagggaagaagttgtgcaccagggcacagaaggccatcccatcactccagctggaggagaagttctggatgtcgacgtgctataagccgtaggaggactggtcaggaacctgggggcaactcccccctgctgtctacccctcagcattctgttattccagacctagggcactgggcacaaagaggccccgtagcttgcacaatgagtgaatagttggaacatgagcctcctccaagtcagcctgtcaactcccatatttgcaatttcaagggacagagctactgagaggcccagcgccacccagctaaggctatggtcatgcctcatcactccttccctcatttagagaaattgactcagggcctcctacagagcaacaaggaggggactccaagagtgggatccggccttgaaccctgcccaccacccaagaggccctgttacttcatcactgattctggaatctagggcttgccttgtgtcctctttgagcctcagtttcctcaccccaagagcctttccatgttccctgtgaggccacacagtggcaggaagtgtactgggtaataggagctctgctaagaaggaggtgttgagctggggtctggggaggcctccaggccccctggcctcccggggctcacctcgtagccgcgagtcttggctcgacaccagtccagcagcatctgcttgatgctgttggcgttggggaccccgaagctggtggatcgctgcacggctgcgcggggtccgccagggctgctgtaggggcggtgtcaggaccaggtcacacgactataaggggcatgcctcggtgggcccacccagtggatcccaggccccgccttccatgaccttcgggcctttgcaccacagatctagccgcgcggtcttcccgcctctgccgggccaactatcaagccccgccccccactgcctatcacgccccgccccccactgcccagcccacttctgcagctcacccggccgcgccctccttctccagcttctcaatcatggccttgcgcgcctgggaggctgaggtcttgggcagactctgcgccttcatcagctctttcttcttctcggcctgccgtttctcgagcgccgccaggctgccggcccgtgggctggcctggtcctcgcggtcgaagatgctaggggttggggaggcgcatgttaggcagggagagcagggctgctccccagcctggaccaccactcgcgaggaggagggggggtcttgtagcacactagtatctccactgccacaaacgcctgccagggagggaggcgtcctcatcacacgcattttagaggagtacactgagtctcaaatgacagcaaggttttcaacaggtttccgcctccccctcccccacccacgagtagttctctgagaagcctcattgtaccctcaagttacaggggagttcagcttctgggcactatccgataataaaaatgatgactagcataataatagtaataataataattcatctctgttgatcctttcctgtgtgccattttaaacttcacaagagcagggaggggccttaccaattccactaaaggtgaggaaactgagacctctggcagtaacttgcctaagatttcagaggacgtgatgggcggaactagaacttgaacaaggtctctctgattcagagtctctggacccctttggttctcatcctggattctgatcctgttcctgctttctgccagccccaacagcctctgttacatgggggtaccctcctttctcatggggctaaggtataaaggtgctgtgtgacctgggacatggtttgcagatactgggaagtggcagtgccaccaggcagctcagtgtggtaggtaggcctctgtaagtgttcaatgctattgcagccactcagagatgtgagcccctaagcaactcactggcctccctgagcatccacctctcctgtggtgtggttgagaataaaatgagatcccaaggagagcaggatccttaactctcactttgcccctccctggctatagacctattacctcccagcatcccagtctacccctctgttttatttatttatttatttatttatttatttatttatctatttatttttgagactgagtctcgctctgttgcccagactggagtgcagtggagtgatctcagctcactgcaacctccgcctcccaggttcaagtgattcttgtgcctcggcctccccagtagttgggattacaggtgcctgccaccacgcccggctaatttttgtatttttagtagagatgaggttttaccatgttggccaggctggtcttgaactcctgacctcaagtgatccgcccacctcggcctcccaaagtgctgggattacaggcaagagccactgtgcccagcccacccctctgtaaaacgggtttgcagttaggtcccctgtggcactgactcctctatggtcagggattgggtgctggtgctcacctgcccatcttcttggatgaggaggaagaggagaaggtcttggtttgcatcatggtgctgccactgccatctgcaaaaaaggggaaggggcaccaggtgagggcctgggctggacatcaggagatgggatgggaggctgtatggaggggtggtgatagccgcaggcagagaagagaaagtgacggcacagttgaagacacggagagagagctcaaggaagagccggaggaggtgggcggacaggcaggcaggcacagggcgacaccaggtggccttactctccgagcgcctcacgaaactcgactccactgtggtggtgcgggccgtccgtgtgccatcatctgcaggggcaggggatgagaaggatgtgaaaggcacagggggctgggggaggatgtgttcccaccctgagccctgggccggccccatttggccccttactggagtggacgagccgctcagtcttggtaacagtgctgacagcagagccatcagctgcccgctggctgtgcctcgtggtggtctcagtggctgtgttgccgcgcccctcccctggccggccccgtgcctcctgcagccgccgttcccgctccttgtcccgctggtctgggcaggggatgccccatgcatgcgcaaaagggccaccaacacccacacagcacagatgcacaggtgcatggggcacacaagacggggtggagggtggcttgttagaaacatgaatgacacaggtaacaagggcctctctaggagcagctggggtgaggggacagccataacttgacagggaatggagtgtgggaagggtttgatggactcaggcagaaactagagaatacggagtagctaaactcaaaggggtatggatccaaaaagggtttctataggcatgagtagctaagtcaggaggggtatctagatctagtgagggggtagctgagtccaaggaaggagaagctgagtgaggaagtagctgggtgggccatcagcaggtctttggttggaggagaagagcagctggaggcaggaatatttagatccaggaagggagcaattgatgggatctgagaagcaatctgatccaggggaagagtagctgggagagaagctagtgaagggggttaactgggcttaaaatagaagtaggtgggtagagatagagactggggtggccatcagtgggccctggcagaagcagctagattcagaggagtaattgagagtgtttgagaggagaagcaattgaacccagaatctaagggaatgaatagatgtgtccagggaagaactatctgggggaggaagtagttgtgtccaggaaaagggaagctggatggggcagaggctaagatggccatcaatggacttcagggagagaggagcagcagggagaaggagtatctggattcagggaaggagtcgttgacagtactttgagaggcaactggatccaaggagagagtagctgcgggagggagtatctgggtctaggaaggagaagagaagctggttggggagaataactggggtcaccagcgggagagaaggagctagggaaggagcagctggatccagcagggaatagccaagggaactgctgggtctagagaaggagaagctgggtagggcagttattaagctggggtgtccacaaatggaccccagagtatgaggggagcagctggggaatggggcagctggatctagggtagggcaactggctctctacctctcttcctttgtcggagctcacgaagtgcagcccggatgagcttccgctcttcaaagtccgtgctctgatccagctgcatatagagcccatcattgcctacctggtgcctgctggcctctgccaacccccagcccaccggatctggctataccatcttgtccaagactccttcatcctcaatagtcatcagctcctcagcgctcagagggctccgcccttctggtgctttgttcactcgggtctgctcagccccattggccgcttccactgctgcagcgagaggctctgctggctctgcttccatctgcagggtggggagagggcatggactttaagcaggggtatgggtgaaactcatcatgtctccaatggatagggaagcagatcctagggttgctggcacgccttggaaataaccactagcctgccagcctgcctgcccaaagatggccatgtcagcgtcagtcagggaagaggcactgacagttttgttgtagggcttcccacgtaccccgaattgtattaatacaatggatagtgataataatgatgatttccagtccatagtaagtgttgtataaacactagggactttactgtccctatttaacagaagggaaggccgggcgcagtggctcatgcctgtaatgtcaacagtttgggaggccgaggtgggagggatcacttgttgccagcagtttgagaccaacctgggtaacatagcgagaccgcatctctacaaaaacaaaaataaaaaattagctaggcatggtggtgtgcacctgtagtcccacctactcagaaagctgaggtaggaggattacttgagcccaggagttagaggctgcagagagctatgatcatgcagctgcactccagtctgggcaagagagtaagaccctgttgcaaagaaaacaagaccggaaaaaaaaaaaaaaaaaacagaaggggaaactgaggctcagggcagctaactgacttgcccacagtctctctctaagtgtgatgcagcctgggatctgagctgaaggcagcctaactcctgaaccttagttcattttgctgctttgttcccagccccctcccaggcaggctctgctctgtgctgccagttcccgaggcctaggtcctcctgggccagtgcccaggcagcacatgttgccccccatctgcctgctaccttgccaagagggctggcccggggcctgtaggctcctgaccaggtgtctgactggggctgccctgagccaagacctctatgaagctctcctctgtaccacctccccctgcctcgcccctgctggaaaccatcctctaaggagtctctagccctgcagccctcccagggcatctccctagccccttgaagacaaggccccaagccaactattatggcccttcctctcctggcagggcctctccgtctgctataagggtaaggagagctgaggtggcagctgtttcagggaggcttggtctggccagggtgcagggcggcagggagctgggggctggggcctgggtcatgccaggggctgccaaggcagctgccacacatgcctcagggctggagcctggcaccctcttgccctagtcttagagcactagtgccccagtcccctgtcaagatagataaactgaggctcagagaaggtggtgacatacctaaagtcaagaggaggcagagcctggctcaaaactacccctcccaccaacccagaagcacttacgagactagtgctgcgggtggtgccggtggaggagcggcggcgggtgctgaaggcaggtgggtgggccacgggggtcccggcatcctcggcagcctgaaagagggcctcggggtcggcggcagccaggagcagctcgctgggctccagctcaggctcaaggccggacacaagtgggacccccagccgtaggctcagcacctccacctgcctgctcagtgcatccagccgccggctcagtgctgctctctctgcccgcagctcttcagctgcccgggccaccggctccacggtggctacagctacctcggctgcctgggtcactgccacccggcctgcttcagccaccgcccgcagctcctccagtgcccggcccaactgctcctcaagggctgcggccagctcaggcccaggccctggtacccccggcatggtgctggtggggactctatggggggtaatggtggggcagtggcaggggctgctgtctctggctgagtgtctgagtctttgcagctggtccgagggcaaaggcaagggcagcgggcctgccccgcccctgcctcccagcccgccaccagccagctggagctgcagcccaaatagaaacctattctgggctcctccgtggaaggggcagtgggggagggggggcctgcccaagcaggcggatcgccaggcctggctatagccctacagaaatcataggcctgcagcacagtaagactgcatgggttctgaagatcactgagatcggggccccatgcctcacaggtggggaaactgaggcagggaacagggaatggacctggcctagccaccatgtacattagctgtgagaatcagtctgctggactccacagcctgtactcctttaccctttaccctaactccagctgttttagacagctggaacagatgggggaaatggaggcacagggaggcaggactttgagtgatctgctataaaaagtgtcttggtcttacataaatgccctctggcctgcccatggtgctcacgtccaaccacagactttgagcaagcacattatgggtacatcacctgtcccctttggttccagatgggtaaactgaggcaagttggtggtgtcagacccaggtctcactgtggcacctcccatccacctcaagggcctcagcgggtccccccaccccaccccacacaatcccttgtcagagggcagctggatcctgcttttttggaaaggaagggtgctttatttccctcactctctccctgtctcccctgagaaggcccaaagctggtctagccatctcacctcagccaaagtcccattcagtccctggtttagcacagagggcattacctgggcagccgggtggcccgcttggggatccctttcccggctgagctcccggctagtggatcctgggcttgggaatgaataatggaagggtgctgcgtattcagttcccaaggcacctgctaggctgctgcctcacctgattggcgcccctctgcctgtctgtcccccctcagagcttctgcccaacccccacagggaggttgacgcagatgctaatcactaatctccaatctcctaatgggccaggctgatcttggatgagcagatgagctgctctatacctcggggctgatgtccagtgtgggtgggcgcaggggcactggggctgccacaggaagaggggagcaagcccttaccaccctctctgagcctcagtttccccatctgttcaccaggaatgaaccaaccaatttcgaactaaggatcagagatcagcatccaggaagcttaacgccagtacagagtaagcttccgacacacttagggactgatatgctagggtctggccttagctctgccaccgactggctgtggtctgtgagcagccaccttccctctctgggcctcggtttctctgtgtgtgcagtaggggaggagcagaggaaccctgctagccctacaccctgaagcagtgtatgtgaggctgacggatggtgaggctggtggggtgaggaggggctcaccttgatgctgcagcctcctcggctactggggggggcatggctgaagctggtgacatgagtgacactgcccagccgagccagggtcccagggctgttgacacgggtgatggtgctcttgcccccactactggtgctgagtagggtcgggggcgcccgcagccccagtgtcagttctgagtggggagaaaggtggctgtcaggaggatcaggtggagtgagggcagtgccagacaaggttgataatgccctcgctcccagcacaccctttggagacaccctgagtcctggccgcagcacctgtcctgcatgcagaagtgcggttgcaggcactcatccccattggggaggcagtggggggcgcctacctgccctctggttgcctgtgggcagcagcacccggcctgtggaggcctggccacggccgtccttgatctcgatggtgaatgtggtcttcatactgccccctggctcggcagtgccgacggccacgggcagcggggcaccaggctcctctgaacgtgccacaggcccccctgctctgttttcaaggggcctagcagccaagccccgccccctggggccctcctcctgggggcagcttcgaagctgggccaggggctgggctactcctcgttgctccttgctgaaccgggaggaggtatcactggggccccgagaggaggagccgctggaggaggaggcaggggtggtgctggtgagggaggggcccaggagccttgcgggggtcaggggacttagggcagcctggggtgtgccatcctggagcctagcagccataggagaatcagatgtgaacttgtggacacgatcccgcacagagccagcccgctggaatgaggaaggtccgctggcaaggggggtggactctagaaggaacaggagggctgtcagcaactgggtgggacagggtctgcacagatcctaggcagggtgagaataggtagtacctcggttctgggctggttggcgggggctgagcaccgacagggagcgttggcagggtcggggtccagccacgtctggcaggttggggagggggtgatggccatgtggggaaagagaaaagacaggggatagtgggtgtccacctttcataatcctctcctctacacctccctagcttcccaccctttcctgtactcaacccccaccccacctctccatcccctcctggatctcccacactccggcatccccactcggctgcatctctcctacaggcacctccttctcctgccacactgaccctaggatgacttggacactcctgggggccaggcgaggcttaggctggaggaagggtgcccagatcctttctgcagatggggaggggggacagccctcctggccagtgctgcccacagctccagctgggagatgggtggactcccttattggggagaagaatgtgcctgaggcccgttgcctttcaaggctgcaggggaggcctctagccatgggggtggagggggaggctggcctagctgggggcggggacacttcaggggtggggtgcagtatcagggactgcatggacctgaggaagctagagctgccaggcacaagagcccattttctaggcagggaaagggaggcagggggaggggaagaaagatgcctgtgactacccctgctgggaccctcacctgctctcttggtgtcagaggggcctctggtggggctctgggcagcaggggtctctttggggccagacagaagctgcaagggagaagaacagggcctgagcaaggcctgactcccagacctgctcacttgcctggcatccctgcccctcatccagactcaccttgttgaccacctggccctcagtgctggggagcgttggagactcctgaggctcagggctggtggtcttgggtgggctggggggtggctctgggctgcctggaacctcagctgtaaggcactgggcctcggcaggctccaatggaggctcaggagaggcaggggtgggtgaactgctgggtgaggcaggtgagctggatgtgctcccaggtggggctcgcagcaggagtgtcactgtggtcacatcctggctggtgccttcaggggtgggggttggctttgaaacctctgcctgctgttcctgttcctctcgctctggcacctgtaagggacccacaggatgcaaccaaggctccctaggctttgaacgccacccccaccactgagggccaggctggcaagtgcccagggcagggcatgcaaagcagagtggtggggcatggcttcctgtaggcacacctgcgcaagcactggcactggcatgctaagggcagtctctgatccccacttcccaatctcttggcactacctagccaaaggggttcagagaggaccaggtcctgatgtcagtgggtgggtatggcaggagacctattggggacgggagccttaatagatccctggagtggaggttcctgactcctggcctcagcctggttcatctggagtgggagtggggtcctgccaggaccgtggacccagcggcctctgctggccacttggggaacctgcatggcctgacctctcacccacactctggaaaatagagtgaactgtgagccagctggggtctgacatgcaggccccataagccaaggtaaagatgtgggctgtgtggagggtgaggggcagccctgggacgggttgaagcaggggaggtgccagggccggatttgcatttctgggagatccctctgactgctaaatagaggctggatggcaggggtgggccccttacagtgaaataccagcctagcaaagacactcaggcactctgtgctaccggtatccatgggcacaggacactgggccactctcccaccctccttacctcacactgttccagcctgtgtgccgctagccccttgctgtcctctcttgagccactgttgggacgcccgctgtacaacctcccagccaaggtggcagctggaagggaaggagcaagtggcaggtgagtgacagggaggtgctgtggacagcagacagcagggcaggggtggggccgggacaggccacataccctcaatctcctgagcccgtacacggcggatggcagctcggatcagcttgcgctcctcatactcaccagcgcttcgcaactgtgggtaagagacaggtcgcgggtgttgggctgtggagtccaggtcttcacctgccctgcccccatcccctgccccagcctgggcctcaccagtgcagtcaattcctccacatcgttcatggactccagctgccctgccagccgtgccagggcagcccgctgctcagcttcccgctgctgagagctgcagagacatcatgactgtaaccaccactgccatggccaggtcgtggaggatgtgggctaagggtaggagccagaacagagtacccagaaccttggcagaagggcatgtggctgtgcacaccctctaactgcacactgatacacatatgcccatggacgtgggcactaataccacacactcagacgtgctggctacatcagcacggccgcgacgccacaatcagtacatgctccatgcccacaaacatctctgtttttccagaagcgtgtgtggacgtactgccattagcacatgcaatccacagatacacttgtgctcacgcctgcctgcacacatgagctgagccagggctcacactcaccttctcacccgcatgttccaccccccgctactcactgcagccagttctccttgttgtcctgccgctcggcacggaaacgcttggatgccagggcctcctcctcgcgctccagctcctgccgctgcagttcccggatggctgagcggatgcgccgccgctctgccagatctgctgtgacctccagctgcagtgggtgcgagaggcaggtcattttggctgccaggggcggagggctggcaccagctgcccacggctctgcctagggcacaatgtgtggcctgtgtccactccctgtgtcccaagctcttcacgtgcctgcctgcccacgcagggtcccgggggtagacccagcccactgtttcagggatcttgggtagtccactttgcattgtggttcacagagcacacaactgtgagtggacagccagaaactgcccacttgtgccaggtgccaagccaggcactcctttctacaactcgattcctgcctctcagagcccagatccccaaaagtcagggagctattgtaggaggaggagggaggccaccctgtgggtcactaacagggtccctagagggaaaggtgacagatgaagtccaccctctgagcaagggaggctccctggtctagtcaccaaacaccacagcccagctgggggttgactgcttcatccacagatggggaaactgaggacaggtgctcaggagtcctgcctggctgagggctattgtccccactgcactggcctggacctagccaccatggaagaagccagggtgcagagtgggaggaccaatcccccagacatataaggtggctggcactaggggccaccccagggccttatagagggcatccctgggtgacagctgcttctaccggttctcaacccctcagttcccgggaaattgggggtgactggtctaaccaggttcaggaaagaacaccttctctggagtgagtcagccaatcctgttgcctcccccacacctccaccatgtagagccacctgctacatacagatcctccgtggctcaagggagagaggactggcccagggttcccctggaagatagtggcagagataagcctccagtgtgggtctgataaccagacgggagccagtaaaggcggggtgatttcctctgtccccaccccccaaatcattcaggggtagggccaaagaaccctctatcatctccctttttagcgcccccccgtcattcctttctgcttagcgggaaggccaggtggcaagggtggggatgggatggagatagttttcagcagggagtgtgggctggcccaactcagccatgagccagcttgtcctagtctgaagagagcagggagagtcttgggggaagagccctccaggctccacattcctgaggaattatgagaagaccccctgaaactcaggccagagcccttagttggttccagccctagtccaatcctggctgggtgatcaagagcatatcccttaaactctctgtgtcttggttttttcatttgccagtgggtggggttgggaacagtgacttggcctctcctgtacatagctgcagttgcaataagcatcacccccatacttggttctagccagtcaggaggagggagagagacaagggggcaaatgggaagggcaggataccccgaggcatcagtaacatttatggagagcctgtgagtcaaaccctgtgctgagccccctacttgtcctaagcccacaaaaaccctagatactactgttattcccatttgacagatgaggagattgaagtccagggaggacatgtgatttgctcatggtcaaatgacctgagccaggatttgaacccaggtctctctgactccagggcctgccctaggctgaagatagctctgctactggggtctgtgtgtcatggtggggacctcagggatcctggcactgtgttggagacccctctagcctggactagagatgctctgaggcctaaggaggccttatagcagaggcggggggaatgaggctcactccccagcccccggtgctggctgtgtctcaggcctagagccttctgtggtacatttggaggctgggggctggaggggacagagggtccagccccttctgtacagagggtaaagaggcccagaggggcaagggctagccttttgtctcctaggtccccattctcagtgctctgggctcggagatggggtccttgtctctgacaaaagcctgatgtaggaacttggccacctctacagcacaacccccggagcttcagtgtccccatctggaaaatgggagcctccctctgatcccccaaagtgggtgggcaaggctggagactgacaacctcattccactggtcaccctctggcacgacccttccctttgggcctggaggcaaaggttggaccacagtgtctcctctgtgtgtcccgagttccacccgcccaggccccaccgctgtgtaaggagggagctgtgggagggagggaaggaagtacaaagcgccattgtctaccgagggggaaggggaaggggatggggcggtttccgaaactgcccagtgaaattctcccgggaggaaagagggtgcttcctccccctggggagccggctctccgtgtactctctgccctcgctgttgggaacgcctggcaggccctgaggtctcactgggcctcagtctccccaacagcacaacggagggggctctccaggctttcagtcccagctcccccggttgcccatgggggtcccgccggcggtggagggaagcctcgccagggggcgctgaaggcccgcaggttctgcgaccgccctccctcgcagggcgccgccctcgcctcgcccaccctgcctcgcgctaggcgccgaaggggtagccaggtaggaagacacccgctaccgcctgcttcagtgtccggatctaaagggaagaaaccaaggtccccaggacacccagctgagtggcggaggtcgaactcgaactcgggaccgaggcagagggcgtcccggcgggtggtggaggggcacgcggcgtgcaagtccccaggcgtccccattcctcccatccccggcccaatcctcaagaatgtgcgggagccggggccggaagcgactgcccgcgtccccaaatcggccagacgctggggcgcagggcgggcggagcgggcctagcttttccttatatggcccggccccgcggggaggagcccggctcgggacgcccccgttcttgccacgaggccagcgggggccgggccggcgcgcggggcgcagtaatggcgggcgccgggtgctggaggagccgctcccggggtcggaaagacttcgagaggcaccgatcccgagaccggggcaggttctcatctgtcctttcccagagattcaaccactgctccagcttctctccaaaactcttttccagcgccgcccgagcctcgcttaagagagggaggtggcggctgaagaaccctgagcctgcctgtggataccttgagatgaggatgtgcgggaaccaggcctggcattccctctttttggactgtgctgcctctacgacccccactgggacttggacttcctgagggaaggtcgaactgactggcgggcacctttggaaacctaacctcatcccctccaggctgcacacatcctgcggtgatagtggagaggcagacacccagagagtctaatgcgctggtccgagaacatacaggcagagtgccttggggaggtcatggcagcagctgggcactgcccagtggctgggctacgctggttggttccagcctctgcctgcgggggaaggtatgagagtggggtgggtcacttgtcttctaggtaaagtaaatctttaatttacccccatggacaagggtcagggactgaggagatggagctcctctggcccctcctccaggtcaggctgcctggcctttggggttggggaaggagccctgccccactgggttgccctacggcctctgtgcatggaggtagacagggctctcaggaagaggaacaagaaaggggatggagtgggctcatctttcctccacctgagatctgggtccatgcctcattctgtccccatgccaactctaggacctagagcttgtgtgcaaacacatctccctccctcccttcattttacaggtagaggaactgagactcaagagtagaaaaatgagatgagaagccacagaatccataagggcccacaaaacctgtctctctcttatggcctcgtccagccttgactttcccaggactctggtcccccgtggcccactatggggttgggattttggcacagctccttcttagatgggtgtccttgagcaggtgattttaactctcttgagtcgcagtgcccaggctttcagagctgctgtgattattctgtgacatggtatacccagtacccagcctgccccctgccaggccttggcattattaatcattgctgctaccattatcactgggccagcttccaggggtgggcattgcccgagctattgctctggagaggcatatccagcctccccacacctgtggctgcatacgggcgagtctacagcagttactgtttaaacaggtggtggctgtggagggttgggagggactaggcttcagtaccaggcatggacaggcacatgccacaagggcctctgcatcagccacatggaactggcctacccctgttcccatgtccccctcctcctgacctttcccccatcacttcttcctgtcagctgagaggtaccctggattgaccctgcctctctggcttggctttcctgtccccacagtgggtgatggggccacttaccagcttccgaagggctccctcatccagcccagctaaggcctcgtccgccatctcgctggcccctagctccgtcggttcctttctggtgagatccccagtgcctgtggcacctgtcaccagctcagagaattctgcaggggacagacatgaatcaggcatgctggggcttccagaaaccacaggcacttaggctctgtgccttactttccctctctaacctaggagcgtccattactgtcccatcctataatgtggctcctggctggaagctgccctctgccctagggtggtttgctggaaaactcaccaaacccagggtagggggtctctggttccagccctgccagcttggccgccagtctgctgtgtggcctgggatggactctcatcctgtctaaacctcaaaacagggagggcagggacctggattgagaagccagggcctggcaagacccacccaagctgtgcttaccaccagggggtgcactccagtctccagtttcctgccccacccacccatccacagggcctacccagcccccacccactccgcaggctcagcttctggctgtgggctgaacccgtagttcttgctgccaccaccactgtcattcccccaggtataggaaggtacactgtgtcttccgattcttggagccagctctgctgtccagacctcctgaagccaggtgtccaggcacccagcacctcctgccaattcatacagaattcaattccccacctggaagggctttcagaagctgacctgcccaacccctggatttcaggcaaactgagaagattggagagggccaaggatttgtcactgagcaaggaggaagccaaagacttagagggcagagaaggatgtaatcaaaatcttcgtcatctccggcttccgaagctcccttccaaagtgccctcaagggcctggaacactctcagtgacagaggcaagagccccatcttgccccagtgctgcccatcaaaatggacccctaaatcctggcccagcctcccagcgcagatctctccttcctcctgtagccccaactaatgtctgtctggaatttgaggggccctggtctggcacactgtggatgcttagttaatgtatggtgactgactaatgtgtggccccaggcctgccccccacctcctgttgattcatctttcaatcatcccttccctctcttcagaacagtcacttgggaagtcaccccatacggtgcatgggtggggggtgagggttaccgctccacacagttggggtgtgtgggtcccagcctgttcaagtcactgcttgttccccctcccatcctggtaggctcagaggtgtcaacctcccaatctctgcctgttaggatccttgcctcttacctagttactctgtctgggttaaacctcttcaagactgtccagtggtcaccagccttaggttctgcggacattctgattccccccatgtctgttcttctatggggcagctgaccctaatgcctaatctaggacacccatgggattataagaagatccctgccgctgctcttctccaatctccctgtcacacagtctggggtcgccggacattgtgaggggcctcaggattctgtggcagcttccccagggtttctgccgccacagactagcgcccctgtggggcgtggagtctcttaggaatccgggggcgtcttcccccaacagtctcataactttatcccatggcttagacctctcgtatgggtgggggctcccaggtctggacgttccagaactcctgtctagacatccgggttccacccccggacacgttggggcagcaccaggatcccccccgaggtccgcacacccacctctcagtccagcccacccgtccggcgcaggctcggcttagctctttcgggacccgacagacggattagacacgcgcaggccggaggtgccgcgacccgctgtcccaggcccgctcagcaaccgtcccctggattctgc

SEQ ID NO: 615 - DNA, 523 bp, Homo sapiens
acctcctacatttatgagcaaagctcggtttccctttttgctttccctccgctggttctctgcttagaacactcacaggcatccttgggaaccagactccctgtggtcacaccatcctcactcccctcctcctgcaagggaataggatgtggtttcctggagcttggatagaaagaacaggaagggcgttttcatatgcccggcattaaggctttgaagttcttaaaaccccttctagggtgaaaccgttagggaatttcaacgacgtactagaattattgaacaaatgcaatgggaggatcttgccttgatcctgaagcaacaaatacactttaaaatgacgttttagagggaaatgggggaaattgaatatggactgggaactaaatgattgaaagtagttttgttaatcttgttggtataatattttgtagttctgtttttaaactgctgcagtgtttatggccagagtctaaatgtttacgagttgctttgcttttaaaatattccaacaaaaaaaaaa

SEQ ID NO: 616 - DNA, 522 bp, Homo sapiens
acctcctacatttatgagcaaagctcggtttccctttttgctttccctccgctggttctctgcttagaacactcacaggcatccttgggaaccagactccctgtggtcacaccatcctcactcccctcctcctgcaagggaataggatgtggtttcctggagcttggatagaaagaacaggaagggcgttttcatatgcccggcattaaggctttgaagttcttaaaaccccttctagggtgaaaccgttagggaatttcaacgacgtactagaattattgaacaaatgcaatgggaggatcttgccttgatcctgaagcaacaaatacactttaaaatgacgttttagagggaattgggggaaattgaatatggactgggaactaaatgattgaaagtagttttgttaatcttgttggtataatattttgtagttctgtttttaaactgctgcagtgtttatggccagagtctaaatgtttacgagttgctttcttttaaaatattccaacaaaaaaaaaa

SEQ ID NO: 617 - DNA, 11071 bp, Homo sapiens
aggcaaatccagatcccaacacttgccttggagtgtttggcctcagtttgtacacaacagagagggatcttcgtgaagtattttctcgatatggaccattgagtggtgtcaatgtggtttatgatcagcgaactgggcgatctcgaggatttgcttttgtgtattttgagagaatagatgactcaaaggaggtaaatttgtcttttatatgcctgattatagtactgaattagtgtgaaaagttgattaatagacttatttctgtaaacattgcatccttttttcttcctttttttcttttttttttttttaaagataggatcttgcgtccaggcgcggtggctcatgtctgtaatcccagcactttgggaggccgaggcaggtggatcacgaggtcaggagatcgagactatcctggctaacacggtgaaaccccgtctctactaaaaatacaaacaattagccaggcgtggtggccggcgcttgtagtcccagctactcgggagtctgaggcaggagaatggcgcgaacccgggaggcagagcttacagtgagccgagattgcgccactgtactccagcctgggcgacacagtgagactccgtctcaaaaaaaaaagataggatcttgctgattttgctctgttgcccaggctggagtgcagcctcgacctcctgggctcaagcagtcctcctacctcagcctcctgagtagcagacactacaagtgtgggccaccatgcccagataattttttgttgtagagatgaggtctcactatgttgcccaggctgatctcgaactcctggcctcaagtgatcctcccagaatgctgggtttacaggcatgagccatcatacatggcctgttgtgtcctttctaattttgacctgattcaaactctgcctctcagtgttaacaattggagtgactacagtttcactttttttggttatgctctctgctataggcatatcctaattgaaatctggctgtgtaaagtgagctatatgtgtttaaattaatggaaaaagtatatgtgtaagtgttctcttttgaataagccataatgatgctccaaacagatgattacattaacttttaaaaaataattctgatgtgtgggtttgatatgtttaattttgtgtctataatgaggaaggaacttgtttttctattctctaaatgttcatttatcagtgtgttcaataattgaaaaatagtacatggaaagaattgataattttttagtgctattcttaacttgcctaacacaatgaactaatcaatgtcaatgacttgaaatagtgctattctaacatgttcggtattataaaggaagtggtaggcttgctttaagtttttgcagggagtcttgctgtgttgcttaggctggtctcggaacaactcctggcctcaactgttcctcctgccttggcttcccaaggtgctagaattactgatgtgaaccaccatacctggcctaggctcgcttactctttactaaaagttgatagtaattgatttagaaaattgcattttaaagaatttgaagctcaatacttttagttttgttagaccttctgtcttttaaattaatatatatatatttgtatatatctggaagttttattagaccttaataatcagggtgtttttcttttcttttcttttcctttttttttttttttttttttttttttttttttttttttgagatggagtctcgctctgtcgcccaggctggagtgcagtggcgcgatctcagctcactgcaagctctacctcccgggttcatgccattctcctgcctcagcctcccgagtagctgggactacagacgcccgccaccatgtccagctaattttttgtatttttagtagaggcagggtttcactgtgttagccaggatgatctcaatctcctgacctcgtgatccacccgcctcagcctcccaaggtgttggaattacaggtgtgagccaccgcgcctggccaaataaggctatcttttaaaaacagtaagttcttggcatctggtgggtagaagccaggaacactgctaaataaccatacagtacacaagctggcaccccataacatagaatcagtctcaaaatgtcaatagtgctaaggttgagaaaccccggataactctaacaaactagtactttagtttttaagtcatttatgtcacaggcagtttaatgccttaatttgtcagtcttatgatttttttttttactgttacgtatttgtgatttatatattccttttctcaattaagagatacatgttatcaatttagaaatactaggatatctgagctgaagtaaaagttgcaaaatgcaagccagaacagtgtaatttttttattattaatattttttaatgtgaaacgtgtttatctcttgattccacctgtccccttccacttctggataaaactaaaatggcaggccgggcacagtggctcgcaccttgtaatcccagcacttcgggaggctgaggcgggcagatcacctgaggtcaggagttcaagaccagcctggccaacagggtgaaaccccatctgctaaaatacaaaaattagccgggcattgtggcaagcgcctgtaaccccaagctactcgggaggctgaggcaggagaattgcttgaacctaggaggcggaggttgcagtgagctaagtttgtgccacttcactccagcctgggcaacagagtgagactccacttcatctcaaaaagaaaagaaaaaaaagcttaactggcaactttaaagacaggagcagttacttagtggcaggattagaagttccttttagttcactaggtgacaatatgttacttaaggagcggggtgacgaggcttgtcagctaaatcacagtttctcttttcagttgcccaggctgaattctcagctaacacaggcatgttgtatggtttcttctgtatggctgagactgtctccagtctttagggacaggcaatctgaagtgatttgatttttttctttttttgttgtttgtttgttgtttctttgtttgtttggagatgaggtcttgctctttgccctgtcgcctaggctggagtgtggtggcacgatctcagctcactgcaacttccgcctcccaggctcaagtgatcttcccaccttagcctcccgagtagctgggacaacaggtgcgcaccaccatgcccggctaatttttgtattttttggtagagacggggttttgccccattgcccaggctagcctcaaactctggacctcaagtgatttggcctccccaaagtgccaggattacaggcatgagccacttcacttggctaaagtgattttttttttttgagacggagtcttgctctgttgccaggctggagggcagtggcacaatctcggctcactgcaacctctgcctcccgggttcaagcaattctgcctctgcctcccgagtagctaggactataggtgcatgccaccacacccagctaatttttgtatttttagtagagatggggtttcaccatgttggccaggatggtcttgatctcttgatacctcatgatccccccatcttggcctcccaaagtgctgggagtacaggtgtgagccatcgcgcccagcctaaagtgatttttaaaatctttttaaaatttgtattcctttttgactaacttctccctgattctgaaaatttcactgaagtttcaaagttattagtgtgcatatggtgaagataataatataagctcctcaccctgttttagtaagaagtacttagagattttgtgtgtgtttttttggggggtgcttaggatggggtgcagggagatcaacttagagaattttgatttttggaacttcaaatggaagatgtgttaaatttgttgcagctttgcttttgcagacatttatgtgatgtaaagttctttttaaaaattggaccgggtgtggtggctcatgcctctaatcccagcactttggcaagaggatttacttgagcccaggagtttgagaccagcctggggaaacatagggagacttggtctctacaaatatatatatgtgtgtgagagaataggaaaaaaaaattgtcccagaaacaaataatactctcagagttcttttcaaagagaccaaagagacaactcttatcttcaagaattaggctgtgcaaggcggctcatgctatttgggaggctgaggtgggaaggccacttgaggccacgagttaagagaccagcctgggcaacagatcttgtctctacaaaaataaatgcatgcaggccaggcgtggtggcttacgcctgtaatcccagcactttgggaggccaaggcaggaggatcacaaggtcaagagatcgagaccatcctggccaacatggtgaaaccccatctctactaaaaatacaaaaaattagctgggcatggtggcgcatgcctgtagtcccagctacttgggaggctgaggcaggagaatcacttgaacctgggaggcagaggctgcagtgaaccgaggtcacgccattgcactccagcctgtgcaacaagagcgaaacttggtctcataaataaataataaaatgcattccattgaatggaatactgtttagaccccttctctaccaagaatttttgttttaattagccgagcatggtggcacaaacctgtggtcctagctacttaggagactaaggctggaggattgcataagccaagaagtttgaggccacagtgaactatgatccactgccagcctgggcaatggagtgagacctccttttttttttttttttttttttaatgacctttagtttatgggacactcttacggagaaatatttgtggatacataaaaattgtgtagtttttattagtttattatacttttattagttcagtctcaataaaaggttgaaaggcattacgataaatttgttcttgtctgtttatatcatttcttcttggctgctcactgagtcttaatcagtgtactagactgcaaactaaagaataagattgggggcaggttataaaaagaacatgtataaagcttagcaaaccctttttaatgttctgaagtcagtctttgtaagtgaaatcgctggagactagaaagtatgaaatggcagtctacctgggcaacctacaaaaaatttagcttgaaaagacttcagtctccgctcccctgttgatctcatggagtggggaatgggaattgaaccagaactggaaaattatttaggaaagtttgttaactactctttgttgatctcatggagtggggaatgggaattgaaccagaactggaaaattatttgggaaagtttattaactactctttctgctgagtaaatttaaatgtgttctggacattgttgaggtctagaattgtctatacaatgccctgtacaagctacattgctgtcattttcaaaatcaggagtttatttggattacatatactttgtgcttaattttaagtaatgattacttcaagactggtgaattatacgtgactttttgtgcctgttctttataggctatggaaagggcaaatggaatggagctggatggtagaagaattcgggtggattattctataaccaagagagcgcacacaccaacaccaggcatctacatgggcagaccaactcagtaagagttcaagtttcctaagctaaactatgaaatccaccagaaatatgtgcaaaattttgattactcagaaacttttttcctataattagaattgattctggcaaggggcaacatggcaaaaccctgcttctactaaaaaaaaataaaaaatcagccaggtgtggtggcacatgcctgtaatcccagctgctcgggagctgaggcacaggaatcacttgaacttgggaggcagaggttgcagtgagcctgggcaacagagtgagactctttctcaaaaaagaaaaaaaacataagtaggggttttgataatgtttttaaatatacaaccctcctggctggctcacgatgttcatttgccgggcgcagtggcttacacctgtaatcccagcactttgggaggccgaggcgggtggatcacgagatcacgagatcgggaccacggtgaaaccccgtctctactaaaaatacaaaaaattggctgggcatggtggcaggcacctgtagtcccagctactcaggaggctgaggcaggagaatggcatgaaccccggaggcagggcttgcagtgagccgagatcgcaccactgcactccagcctgggcgacagagcaagactccgtctcaaaaaataaaaataaaatatacaaccaaaggcagtattcacagaggtatttcttgggaataaaagaaggaatatagtcattccttggtattctctttggtgtccagagttacttaaaaattcttggtgtttattgccttttagtcacagggatacaccttttattcatttatttatttatttaccagtctcatttagcagtaggaatgcatcttagcatttttatactgctgctcaacacagtgcttcatcgtttcaatttgttgaaaagattttaatttgggcagtgcattagtagaaaagcagttaatagttttgagagttttgtgaagcccttcttgattatgtatgtagggaataaggcaaaccagaataccatgggagtcagtaaaatgagatacggaggcaatttctcatgaaagggatgttcttcctcacttttctcttttttaagccattcaatttgtattaaagtgtcctggaaaatagtcattcacactaatggagaatttttacatttttctgcagtagtggtgggggtggtggaggaggcggcggcggtggaggtggaggtggtggcagacgtcgagattcttactatgatagaggatatgatcgtgggtatgacagatatgaagactatgattaccgatacaggtaatgttttaacttgagctttctgttctaaattagatgatagtagtgttacttggcacttttatgttggatacatatgaataaaaacttgatttttaaaatagatcatatatgacgcctttgggagcagaagttagcagtctgtatatgtcagtattttgttgtgctatatacttttctggtctcattggcagaaagagaacttaatattaagtagttatcaccttaggtacattattattttgaatgatgaggaatttttattttcatctgcctcagtggagtgattatatagtatgctaagtaatctttcatttcttacagaagacgatcaccttctccttattatagtcgatatagatcacgatcaagatctcgttcctacagcccaagtatgtgaactttacttttgtagcataaaaaacctcatttctaattaatggcttactttagaatattagagtataaggtggaaggtggcagttaatagttggaaaaatatgaggcaaattaaactataattgttaactttttttttttttttttttttttgctttttctcttttaggacgctattgataacggaatggttgcaattaaggacattttttttcctcttttttttttttttttttttaattctgagatttccccaagctgtggattcttcctactccttaagaaaaaaactttggtttatttagcatctacacttttgtcagttgtgttgctgttttccacccattttattatactcttaaaagatgtaattgttgtcattttgaacagttaaacatcttgagtataaaaagaaccccaatgttatgttatgctttgtaaatttttttttttgcttttacctagataaacttctagctaatcaaataaggaaagaaactgtctttttaaagcttcttttgtgttagatactgtattagagatctgcatttatcatgagttcctttttttttttaactttatttttgggaaagtaacacatgaagtagttcagtcatgtcaggtttgtctggggtggaatggaacagtcaggtagttgaaagtttttttttagagatgaaaagcttgtgaactcctgtaaaacatgctgtatttgaaatacatctgttaaaacttaaaaactaaagtgtgattttttttgttgttgttaagtttattgaagtttattcccttaatcagtgaaggacaacccttatttattacctagagcagttgtataattcgctgttagaaattttggtattgggacagtggataagcaggttatcacatagcatagaattcttaaaagatacatgtggggaaaagtagtctcaaataaaagctaatttctttgaaaatgggattgtctctttattgtggtaccatggagaaatatgattgaggaactggtccttccttttccctcacatccccccagtgtgtatttatatgaaagtttacccatcctgagttttaacttcccaatatttctcatttttaaaaatattttttcttacactagaatgttattccttgtcttttctttggttcttttaaaacccttgtttttcttctcttttgggggagaccgaattgtaaatattgagaatattcagtaccagcaccatgctgaaggaaagataggtagctaatacctttttttttttgagacggagtcttgctctgtcacccaggctggagtgcagtggcgcgatctcggctcactgcaagctccgcctcccgggttcacgccattctcctgcctcagcttcccgagtagctgggactacaggcgcccaccaccacgcccggctaattttttgtgtatttagtagagacggggtttcacggtgttagccaggatggtctcgatctcctgaccttgtgatccacatgccttggcctcccagagtgctgggattacagacgtgagccactgcacccggcctactttttttttttttttttttttttggagacagagtctcgctctgttgcccaggctggagtgcagtggcgtgatctcagttcactgcaagctccacctctctggttgacgccattctcctgcctcagcctcccaagtagctgggactacaggcacccaccaccacgcccgggtaattttttgtatttttagtagagggttttcaccatgttagccaggatggtctcgatctcctgacctcgtgatatgcccgcctcagcctcccaaattgctgggattacaggcgtgagccactgcgaccggcctataggtagataatatcttaagaagtctaaatatattccagtaggaaacacacttaaataactgtaatgtaaaagaagaagagggtgtttcaagtgacctttaaaaaaaggtgttgggcagctgggcgtagtggctctcacacctgtaatcccagcactttgggaggctgaggcgggcggatcacgaggtcaggagattgagaccatcctggctaacacggtgaaaccccgtctctactaaaaatacaaaataattagccaggcatggtggtgggttccagtagtcccacctactcaggaggctgaggcaggagaatcacttgaacctgggaggcagaggttgcagagagcaccactgtactccagcctgggcaacaaagcaagactccatctcaaaaaaaaaaaaaaaatttactgtttgaaagtcctgtcctttttaagtatattttgtgactagggagctgagctcagtagtgtgcacctgtagtcacaactagggatgctgagacagaaagttattttgagcataactactcaaaatagaaataaaagcttagatatttctggacctccactttttctgtttactattaagatctaaatgtggccgggcactgtggctcacacctgtaatcccagcactctgggaggctgaggtgagtggatcacctgaggtcaggagttcaagaccagccttgccaacatggtgaaaccccatctctaataaaaatacaaaaaaaattagctgggcatggtggtggacacctttaattccagctacttgggaggctgaggcaggagaatctcttaagcctgggaagcataggttgcaatgagctgagatgatgccattgcactccagcctgggcaacaagagcaaaactccatctcaaagatataagtgttttcaactggcgggtaagaaaaactgctgctgttggttctctaacttcttacaacggtggttcccacttaatcttatttaggtcctggagccctaaaaaaaaaatctgaaaaacctgcagtctgtcttcccagaaacacttgtgtgaaacgttctggtgtttttgtgttgagacagggtctcactctgtcacccaggctggagtgcagtggtgggatcacagctcactgcagcctcgactgccagactcaagcaattctcccacttcagcctctcaagtagctgggactacaggcgcacgccttcatgcctggctaatttttgtacttttttgtagagaagaggctttgccatgttgccctggctggtctcaaactcctgggctcaaacaaattgacctccctcagcctcgaaaagtgttgggattacaggtgtgagccaccacgtccagcagagtatttggcttttaaattataatcttgtgcatagaataagatctataagaatatacaccaggggccgggctcacgcctataatcccagcactttgggaggctgaggcaggtggatcacgaggtcagaagatcgagaccatcctggctaacatggtgaaaccccgtctctactaaaaaatacaaaaaattagctgggcgtggtggcgggtgcctgtagtcccagctactcgggaggctgaggcaggagaatggcatgaacccgggaggcggagcttgcagtgagccgagatcacgccactgcactccagcctgggtgacagagcaagactcagtctcaagaaaaaaaaaaaaaagaatatacaccagcctgggcgtggtggctcacgcctgtaatctcagcacttttgggaggccgaaggcaggtggatccacctgaggtcaggattttgagaccagcctgaccaacatggtgaaaccccatccctactaaaaaaaaaaaaaaaaaaaaaaaa

SEQ ID NO: 618 - DNA, 286 bp, Homo sapiens
gaattgcacagcaacttgaactattacacacaaatacatattgctttgctgtggcaattaaaagcccagcattttaatgtattcctatccctgatgtcacacttaatgctttgggtttttagtatgaattttctttttccctcccaattaagttaaaattaaatgaatcaaatggtcaaaactagtgcatatttttattctatgaaacaattcagatacttattgacattaaaagatcaggggaggagtctttgagcatactctggctagggaagctgctcaataa

SEQ ID NO: 619 - DNA, 754 bp, Homo sapiens
gtaatcatagctaacacttttattcagtacacttaaagcttttaacatttctgtgaggcaagttatgttatatataaaaaaaattgagtcttggatgtatgacattgaaggagttttagttttggttttggtttagtttttgctaactagcagtctaggtttcaaccaggcagccgggctctaaagttcttagaacatgtttgcatgctgtactatgcttctcccacaggatactaacttaaactgtggtggagcatgtcattatttaatgttttgaaatctgtaaatttatttctaaaatctggattgtgggaacactgaaagaatatcctcgctaaagaatgaaaatgggccaggcatattggctcacgcttgtaatcccgactacttgggaggctgagatgggaggattccctgagcccaaggaggccaaggctgcagtgagccatgatcaggccagtaaactccagcttgggcaagagagtgaggccctgtctcagaaaaaaaaaagaaagaaaatggaggagaggaggtctaaatcaacaattacagatgaagtcagattaagtacaaatctgtaagggatgtaaagcatttgaattaactagaaagatggtattaaactgaggatactttttttttataagtgagacggagtttcactcttataaaaagtaaaggttgttcaaagagattttcctccccatctaattagaaatagataataatttctcttagaagcaaaatttattca

SEQ ID NO: 620 - DNA, 25211 bp, Homo sapiens
  misc_feature (15723)..(15724): n equals a,t,g, or c
gagccaggcagtgagactggctcgggcgggccgggacgcgtcgttgcagcagcggctcccagctcccagccaggattccgcgcgccccttcacgcgccctgctcctgaacttcagctcctgcacagtcctccccaccgcaaggctcaaggcgccgccggcgtggaccgcgcacggcctctaggtctcctcgccaggacagcaacctctcccctggccctcatgggcaccgtcagctccaggcggtcctggtggccgctgccactgctgctgctgctgctgctgctcctgggtcccgcgggcgcccgtgcgcaggaggacgaggacggcgactacgaggagctggtgctagccttgcgttccgaggaggacggcctggccgaagcacccgagcacggaaccacagccaccttccaccgctgcgccaaggtgcgggtgtaggggtgggaggccggggcgaacccgcagccgggacggtgcggtgctgtttcctctcgggcctcagtttccccccatgtaagagaggaagtggagtgcaggtcgccgagggctcttcgcttggcacgatcttgaggactgcaggcaaggcggcgggggaggacgggtagtggggagcacggtggagagcggggacggccggctctttggggacttgctggggcgtgcggctgcgctattcagtgggaaggttcgcggggttgggagacccggaggccgaggaagggcgagcagagcactgccaggatatcctgcccagatttcccagtttctgcctcgccgcggcacaggtgggtgaaggagtgaatgcctggaacgtactgggaactgcaccaggcacagagaaagcgggcttgccattatagtgggttccgatttggtttggaaaacatgggcagcggagggtggagggcctggagagaaggccctacccgagacaggggcggggtgggaaggacggcagatgctgggagcacgaggcaatttctttatgacacagaactcatgctctagtattccatctgtttcagccgaagaaaagaaccagctgaaggggcaggggagaaggggcggaggtattctcgaggcccattggcgtcctttaggactcaggcagggaagggcccttggtgctctggagccggaggtggtgcgcctggtactgggaccccggagctgagcccggcgcctcagcccacctggctgtctgccgaccgtgtgcggggcgagtttgctcaacaactctgccagcttctggccctcaggctgtgggaagcttcttcccggggcgagaccactagctttttctaagtattaccagcccaggacttggctgaggttctgtgtcccccagcttggagtcagatgtggggttgaatcttggcttcctctcactagctgtggtgcttgacaagtcacttatccttgagcctccattgcctaatctttaaaagggaggtgacaatcgtccctacggctcagtggcagcagatggggagatgaagggaaagttctgttgaccatgagtgaacttacaatgcaagccccggggggatcacttgcagttttgtccctgtctgcagtgtgacctgttggtgacattgtctttgctccaaaccacagctcctggggcagaggggaaaattctgccactcacagctgcctgcccacgcttctgtctgagtgtgctgggtggcaggatggcaagtccttactcagctcagtatagccctcttccttgttccctgagcctttgactttctcgagggatgttgtggggttgtggccaggataagaaagggcatttcaagttaccactgctccaaaacaactgttctggaaatagtgagtaccccatcctgagaggtgagtaagcagaggctgtatgaccacctgaaccaagcccttgaggatgtttcttctctggtggaagtttggaacaggagcctcctcaagttcatttattcattcattcaatggttattttgtgggaatcgaatttagaatgaaaatattttttggcaagcagaaaataatttttagaccaatccttttcttttagtcatgagaaactgaggcccagagagaggaggtcaccccaggtgcattagaactgggtttccagaactgacactccactgcacagagtactctcccaattcattcaatttttatttagcggaaggcattttcagatgggtctttgaagcattagtaggagttcagcgatgatggtgtcatgagaattttattctaggattaggaggtaccatgaacaaagatacagagctgggaaaaccagaggtggaagataaggagcacatgtccacagttctttttcttttttttttgagatggagtttcgctcttgttgcccaggctggagtgcaatggtgcagtctcagctcactgcaacatctgtctcccgggttcaagtggttctcctgcctcagcctcccaagaagctgggattacaggtacctgccaccacgcccggctaatttttgtatttttagtagagaaggggtttcaccacgttggccaggctagtcgcaaactcctgacctcctcagtggatccgaggaggtgatcctcccgcctcagcctcccaaagtgctcgaattacaggtgtgagccaccacgcctggcctccacagttctttatccaccgtctgaaatgtaaaatgttacgaaaaccaaaagttttttttgtgatttatttgatggtagcacctgacgtgaactgacatgagattatttttaatttagttgtgtgaatatgcatattcatatattttgctgcatagattacagtatgcagctccagattcttccaagcagactctgattgcccattactgcctttctaaaatccaaacaagttctgaggttcaaaaccgatttggccctaaggctttgggtaaagggggtggactctgttctactctgactggagtccaagatgcatatatacagagatatgggtgatggggctgcaaggtaggttgaggtaggggccaaggaggagcatggagtttggacttgattcatgaggctgtggggagccagtgaaggttcttaagcaggtatgtctgcctgagagcagttggagcagacaagagctaaaaaccaaacaaatcaccatagatagtggctgctataatttgtttgtcccctccaaatctcatgtggaaatttggtcctcagtgttggaagtggggcctaatgggaggtgtttgggtcatgggggaggaacccctgtgaaaggcttggtgccgtccttgtgataatgagtaagttctcccgctatgatttcccttgaaggctgattattaaaaagagcttggcacctccctctcttctctcttgcttcttctcttgccatgtgattgatctctgcacatgtaggctccccttcaccttctgccatcagtgaaagcagcttaaggccctcaccagaagcagatgctggtgccatgcttcctggagagcttgcagaatcatgagctgaataaatcccttttccttgtaaattactcaccttcaggtattcctttatatagcaacacaaaaggactaagacagtggccttgacttttctctctctttaagaagtgttgcctttgctcacttagtcatcccttctgcctgcatttgtagagcatctggatgggagatttatataaccgtcactcttgactttcccagcaggcctatgtcataggtactgtggtctctacaatacagcagaggtatctgaggctccgagaggttgagtgacttgctcatggctgcacaaccagtaaatattggagctggaattcaggtccacggtttcctggctccaaagcccatgattttttccctcaatttattctgactggggcatgggggagggggtggcctttgggcagggccaccaggagcgaccaggcccgtagagagctgggtgcaggtacagaggaaaacctgttgtcgagtgtggcccgtagttcccatttttgcctgaatggcacatttgaaagtgttatataaccatgtgaataataatagttggcctatatgagttttttaatttgctttttggtccgcatttggtaacttctttatcatctactatactctgttgtgtctcttttgttgtaatttgtaagtaggggtgagataaagtacacctagggtttgctgggtttcttccatgtcatcatgttcctccttgcatggggccaggatccgtggaggttgcctggcacctacgtggtggtgctgaaggaggagacccacctctcgcagtcagagcgcactgcccgccgcctgcaggcccaggctgcccgccggggatacctcaccaagatcctgcatgtcttccatggccttcttcctggcttcctggtgaagatgagtggcgacctgctggagctggtgagccaccctttttgggaatggcacttcctgatagggctgggccactgcatatacactggggactgtgcttagtaggcccattgctgaaaatcagaaggggacagcaagtatgtattgagcacttatcgggtaccaagcacagtaactactggctttctgtatagaattccctttaagcctggccatgccccagtggtacgtctatcttcatttgaaagacgaggagactgaagttcagaggggaccacacagacagctaggggtagagcctggatcaaacccattggtctgcctgccagccattcttgtgccaatgcatctgctgcctacggaaacctgtagggacaaggccctgggatgttcagtggagcctgagtcattttataaaaaagcatgactctagggtccaaaattcctttgaagctgttgctatccagagtgaagtcccttctttaggacagggtggccctcctccctcctggatgtcacatcttcggtggaggggcagaaaggggactgggtattctcctcaccctggccctagtgcttcaaatcttaaaaaaacgtttttatttgtgcttctgcaccaccttctagcccacctcgtttcctggcctctaacttgatgagagcgtgtgtcattttcacactgattctccacatggcaggcggtgcttcttagcctcctgcagacagtgaggccccacggtcttgtccaaggtcacacagcgtgtaatgggcagggtcagagtctggagtctggacctgggtctcctagctgcactgcactgctgccccatgggttaatcagctcagcataccgtggctgaacagctacctcataccaaggcctgtggcgccatgacagggattgacagggtccctgccttggaaacccgtagtctaagtagaggagactgacaagtcaatgccttccatcagtctgctcaacacacgtttaccaagtgcctactgtgtgctgcagaggcgaagatgacacagctcaggcctttcccttgagcttacagttcaggaggagagactgaccagtgactgccagtacagttgactatgggacaatgtgctcagccttggggagagacgaagaaggtacccgtatagcaccagatgacaggcacgagccccacaggccagggcagctgctcagaggagagtaggccaagcagaaggcaaacagaaggctgcaggcatttgccatcgagagctggacttcaaactgggcatcataccagcctgggttcgagtcctgcccagccccttattggctgtctaaccctgagcaaatcccttcacctctctgagcctcattcctctatctgtaaaccagttataataattggaacattcatttaaggactaaatgaggtcgtgaagcattcagcagatgctaggtacggaaactcgctgaagtgggggcaggttaagaagcctctggggatacgaaggcatccagggactagttgtggcaggaggctgttaccacttaggtctgaagggtaaggagagggaatagctttccctctgcccagttggagccggtggcatggaggagaggctgcctgtggggaatcacccgagggttcaccgctgccatgcgcagggagtcaggaggtagggagggagtggggcagatgcacaccatttttttttttttttgagactctgttgcccagactggagtgcagtggtgccatatctgcacctctgcctcccgggttcaagctcactgcaacctctgcctcccgggttcaagcgattctcctgcctcagcctcccgagtagctgggactacaggtgtgtgccaccatgcctggctaatttttgtatttttaatagagatggggtttcaccatgttggccaggctggtctcgaactctcgacctcaggtgatcccccacctcggcctcccaaagtgctgggattacaggcgtgagtcaccgctcccagctgctgatgcactcttgtccttctaactcctgctagtgcctcccattggctgagcccaactggaagctttgcaagggagctggtgctgcagtttgcactgagcaggctggagaaggctggagaatagactaggggacaaaccgaattgccagtgctgttatgtcatgatttaggcatggagtccagggcctgagcttcactccatgtccatcctgcccagagccttggcacagcctggctcccagacaagatgtcaagttcagaatccttcctaaaaggaatcctctatgccagaccgtgttgcagggatatgggggtgctgggctcccagcctgatcaaggagcgagaaaactcaggctcctagtctgtcctccggggcactagcagggacaaggtgggaggctgctgggctgggatgtggggacaggtttgatcaggtaaggccaggctgtggctgtgtttgctgctgtccaaatggcttaagcagagtcccccggcctctctggcttctgcaggccttgaagttgccccatgtcgactacatcgaggaggactcctctgtctttgcccagagcatcccgtggaacctggagcggattacccctccacggtaccgggcggatgaataccagccccccggtaagacccccatctgtgccctgccccaccccatctgagctgaatccatttgctctgccctggcctggcctccctgctggtggtttccacttctcggggggctttgggactcagcacctccactgacccctttttttctgtcccatccccatcccctgcagcccccactgcctgccttcctgttgccccacaaatgcaaaagtcttgccttaaatgatcctcttttcctccttttctcttgttttccttttctcaccatttggaatggcccagcaggctgcacttaccttggaaggagggttcatctgatggtgactctacctagggcccccaggcctctataactcccagtgccctgcagactggaccagatcctttaatgggatagacacaaccctgtctgggatgcctctgcctaccttcctgttttgctgctccacctgcctccagctccgtttggcttcctggggctccctgcctgggccactttgtgtcttccctctaggcctttctttccactgttccctctgcctggtgtggcctggctatggaagggagggagcaggagcggccatggaaaacggtctgcattctagcagggacttgcaggtggcaattcagtcggggaagactctagatgcacctggcctgaggagagaatgaagggttctagttggactgtgttaagtttgaggtgcccatggtgtgaggtctggagctcagcgcagagatgatgcaatgtggtgggtccatgcaacatggtgccaggacgcagagcttggggtgaactcagctttcaccccttaccggttctcgtgggatcttgggaagccactttcttctatgagctttgtcgttcttgtctgtaaaatgggcacataaccctgtccctgtccttctcacaggttgctgtgagactccaatgagttgaaggatgtgcagatgcttttggaagtgaaaagttggggggctactgtgtgactttgcatacacccaaactgtgtgaccttgcatatgtctgagttgctgccattgcaacagatcagagctggtgggctgggtgtggagaaagggtttgtgtgggggacatcctctggcaagggtggcagcagcagaagtgaggggcctggtcggtcatgtgtgctgacccggcctgggcagcctgtggccagggagaggacagctcctctgtaggaagagcgtgttcctttccaaccaggtgagacctcttcagtggagccctggagccccctgtactccacatcagtgcctcagggacctcccggagcaggctaatatcagagaccaagagggacactggcagaggatcacagagaccccagtccaggcagggactgagaagatcttgccccctaagttagtttcctagcactgctgtgacaaaataccaccccctcggttggaacaagttgattctctgcagtcctggaggccagaagcctgaatcagtgtcggcaggaccactttctcccggggggctccagggagaagcttctcttgcctcttccgtgtcccaacagcggcagcacaccaatcccagcctctgtcttcacacagccttctctgtgtctctctcctcttcattgtctcataaggacacttgtcattggatttagggcccactggatcctccaggatgatctcatgtggggaaccttaaccacatctgcaaggaccctttttccaaataaggtcacagccacagtttgtgggggttaggatgtgagtgtatctctttggcagccactgttccctcctctcccttgggccagaagcagacgtggggccctttcttccccataggatgcccatggattgccccccttcccgcttcccccgagcgtctgtgggaggtggcaggaatggcaggcaggtgtgtggaaccccttctggagtcatatcaagggcttggctggaggaagtcctcctggagctgttgggctggcatggggcaggctggctgggcccagcagcagcttcttcattcatggggaggccacaagcatgggccctagagctggctgccgccctcaaacccagaccctgcactcttaactgtgtgaccttgcatacgtcactcaccctctctgatcttcaggttcctctgcaaaagggaggtaatgataaccctcactctggggggctgtttggagggttaaatcagttattgctgtagcatgcatttctctgtcaggtattgagtgaggtgctgtgattttagccctgcatttttcttttcttaccattcaataataacgttttgagcaccctctgtgcgccaggcaccatattaggtgctggggatacaaatgtgaatgaaatgaatgtggtctctttccccaacagtgtatccagaagattaatccattccttaaacaaatgctacttgacacagattagttctggataggctgagagctctgaaggagtgcaggcagctgcgagcctgtgtatccagcagaaggatcaggaaaggattcctggaggaagcgctgttctagccaagacctacgggggcattattaaccaggcaaaggggacggtgtccaagcagtggaatgaacgtggattgaagctgtgaggcaggagggagtgtggcctgtgcagaagggaccgaggctggtgagaccagcagggcctgggtggcctccaggtcagatgtgaaaggaagaacttggccacagtctgagcttctcaggcgtatggcagggctgcctggtgagagggaatgagctccctgctctggaggtatgcaagcaggactgggctctcacctgccagaggccacagagctttccagaggctggaagaggccactccaaggcctctttgcccctgagagtggtggctcttcttgaggccaccttgccacgctgtcacagggaactagcagcccctgcctcacccgggggtttggaagatagagggaggcctaggaagggccctgtgtctcatccgagctgggcccctttccagcctctcactggaaggaagcccaaggatgttcctgtgggggcttttaccaggcccacctgccctctgctggccatgcttgcagcctcctgaccctgtcccagcaggacagtgggctggtgtgagcgggcaggaaccgcctgcacttagaaggtgtggggctgcctccccgagcttccatctgccgctggggccacaccccaggcccagggatgggaccccatagtggtcacatcatcttgcagcagaacccaggtacagctcctggagcagatggtggtcccaagcacgggtgggaccagaaaggactctcacctgggctaactcagctgcagcctcagttccctcctcacacacgaggaacatggactggaagcctgcccagcaggccttctgctcgatgtgcgttgtgtggcttacgtccagggagggaagcagcctctgtgctgtcttctagataagcctgtattccccgggctgtctgccaatgtatccagttgtcccgtcagcctggaagctctgagggaaaaccttgggctgcttcctgagcacctgtatcccctgcagccagcccggggcctctgctaggagcagactgagcatggcttatgggcctggcaccatctggcctctgcccaccttgctggccttgtcttgtgtctgccccttcgacattccatagcccagctcaatatctagtggttcctctagggtggcgagcactgtttggtctccagatgtcttcaggtcggagctcacagcgctctcagccaccccttcccagtgtagcaccgggcacatggtagatgcctattgatgagtgaaagctcctaacacactcagagagcaaggactccgcctcatcccacagcctgggaggagaggcagactgccaaggacctgctcagcatgctacagaagaaaccaaagtgcccacgggactgatcagtggagcttcctgccgagactggaggccttagggcagggtagacagtgtgtgtgcaggctggggactcacagttcggactgtgcccagacctactagcatagtgggtgggtgggaggatgcgggactgggggccgaccttgcctgaaattcatgtgggatctcagagcagccactgaattgctctgtagggggctaaatagtggcccccacagatacacacacccagacagagcctgtgagccagaccttatttggagaaaaggtctttgtagatgtaattaagcatctcaagatggcatcatctggattatgcggtgggctgtaagtcctgtgatgtgtctttatgagagaaaggcagagggagatttgacacacacaggaggggccacgtggagacagaggtggagattggagaaatgtggccacaagccagggaacaccagcagccaccagaagccggaagacgtgaggcagggttcttcccagagccttcgctgctgagtctgggaatttgttaccgaagccataagaagtgggtacacgccctgagcctcccacacttgctcacctgtcctgagatgagaatctctactctgcagcatatttggaggatcactgcgggggccacagaggtgctgttcagatggcacttcagaagactcaggagaccctggggcaggagcagtttgactgacagcccagagggctgccctctgattccacctgaggccctgcttttcctggctgcaggggttccagggccaggccatttccgctggcgcaggactctgctagcagcaacctgcctgaagtcttcctttggcctggctgagagtttctgagacctgcgctggagcggaggtgcttccttccttgcttcctttcttcctctctcccttctccatccagcaggctggacctgcctggcatctgtgagctctccctactttctcctataccctaacctttgtcctgcatgggcgactcccccagtgagtctcttgcagcttttaccccagtgcctgcttcttggagaatccaaactgatccagttagggatgataaagtgtagggtaggtgctcggtgactgttttctctgaggttgtgactcgtgtgaggcagaagcagtccccgtgagccctcctggtatcttgtggagtggagaacgcttggacctggagccaggaggcccagacatacatcctgtccgagctgcagcttcctgtctctaaaatgagccggccagcgcaggtggccagacatcactgttattctcctttgagtctttaaatcttgttgtctttcttgcagactcggtgagctgtgaaaggctataataggggctttattttacactttgatactattttttgaacattcatattattgttagatattgatattcatatgaaggagcaggatgacttgggtccttcttggcagtagcattgccagctgatggccttggacagttacctgccctctctaggcctccctttccttgtctatgaaatacattatagaataggatgtagtgtgtgaggattttttggaggttaaacgagtgaatatatttaaggcgctttcaccagtggctgggatgtgctctgtagtttgtgtgtgttaactataaggttgactttatgctcattccctcctctcccacaaatgtcgccttggaaagacggaggcagcctggtggaggtgtatctcctagacaccagcatacagagtgaccaccgggaaatcgagggcagggtcatggtcaccgacttcgagaatgtgcccgaggaggacgggacccgcttccacagacaggtaagcacggccgtctgatgggagggctgcctctgcccatatccccatcctggaggtgggtggggactgccaccccagagcattgcagctgtactcctgggttgcacccccccagctgtcactgtcccctccctgccatcagttgtgggaagggcgttcatccatccagccacctgctgatttgttatagggtggagggggggtctttctcatgtggtccttgtgttcgtcgagcaggccagcaagtgtgacagtcatggcacccacctggcaggggtggtcagcggccgggatgccggcgtggccaagggtgccagcatgcgcagcctgcgcgtgctcaactgccaagggaagggcacggttagcggcaccctcataggtaagtgatggccccagacgctggtctctctccatctggacctggcctgggaggtggcttgggatgggcccagggagagctaatgtctcctaaccaagaatgctgtggcagcctctgccgcagagccagagaaccagagtgccaaggctggcagggttcccagtggccacgagtgcagatgaagaaacccaggccccaagagggtcatgcaggtagcccagggagttcagccttgaccctgggtcaatgacctttccacagttccacactgctccccttttaaaatccggtgatgtctttatgtcttttgttatgttatcttcaatgtggagggactcgaggtgatctaagcaaactttttctatcttctgcttgcatacctctgagaccaggggactcactcacttgcatgactgggccctgcaggtcacactggccaggcagatgtggtggaggaactggcagaggactttttctagactgtgactacatttagtccacccagcggcccccctatgaagtccagttgagaactaggactctgggggcctgtggacagagaagagggagggttctctcccttactgacttccttctgtggccagacattgagcaaggcctctgtacagcatgtcctggggctggccttgccgtagctgctaaatagttgacgaaaccagtccagagaggggaggtgactgccagggtcacacagctcaagctggggaactcgctgggaaaactgtcagctctgggcagcagcttgacttccattgtaagccccagcccccagggtcaaacactggctctggtgctggcagaggcagcccactagcctgtttcaaaggctgagaaggcccaggagtctgccctgtgctccaccagttctgccctgagactttcctacagagtacaggttttgatgttcagttttaaaggcaagaatcaataaccttctgccccatcaggtgaccccttgtgcctgtcccacccctttattgactgacctcggctcagtcaggtcagttcctgaaggtcagtgtgtggaggggaggctgttctttcccagaaaggccttccccaggcctggtgctctggcctctggaggacttcctggagaagtcccttctttggggtcccagtcagtgtatgggaagcccttattgcatgacctggcacggggtaggggctcaacagtcactattgccttccttgccactgccatttcctcctctgtaagcaggtgattgtgtgtccagtctgagcacagagataagcacacagcaggtgcttaataactagcagctgtaggctgggcgcggtggctcatgcctgtaatcccagcactttgggaggccgaggtgggcagatcacctgaggtcaggagttcgagaccagcctgttcaacatggtgaaaccccgtctctactaaaaatacaaaaattagccaggcatggtggtgggtgtctgtatcccagctacttgggaggctaaggcaggagaatcgcttgaacccaggaggtggaggttgcagtgagctgagatcgtgccactgcaatccagcctgagtgatagagcgagattccatctcaaaaataaataagtaaataactagcagctgtaaatgtggctgttgttcttcacctccacactcagtgccactccactccctccctccgtggtgtgaggggcctcactagctgtctcctaggaggagcatggctgtgagattccagctccatccttgaccacggctcctggagacatcttagaggccaggatccagaaggctcccacaccccatttgacaggggagaagctgtcagttccaggtccccttgcacatcagggccagagctgcgttaggcctccagtctccaggccactgggccagagctcacaggctggcagagggttagaactgttactggtggctgggtgcactggctcacgcctgtaatcttagcactttgggagggcaaggcgggaggatcatgaggtcaggacatcgagaccatccttgctaacacggtgaagccccgtctctactaaaactacaaaaaattagccgggcgtggtggcaggcgcctgtagtcccagctactcaggaggctgaggcaggagaatggcgtgaacccgggaggcggagcttgcagtgagccgagattgcgccactgcactccagcctgggcaatagagcgagactccgtctggaaagaaaaaaaaaaaaagagctgttactgttgacagtagcatgaggtagaccatggcctgcaccaaaagggggagtggagtgccactgaggccagaaggaaccacaccctcaagggtggggagttatggtagggggggtcctaggcatggagtcttttattctttagacaatcctgggagcagctgtccctgttcacagagggcggggccacacagctggtgagtgggcagccaagactctgttcaagtttgtgtgggtccaacacttgcggccacggtggaggggcatctgagccaggcctcagagagtggcggggggaagttgggtggggaagtgtnngccttctcattcctctgaggctcatcctcttggtgcctctctttcatggaaagggataataaggttattgtgaggatcccctgagttcatatattcagacgcttagacagagccaggcacagagaagggcccggggttggctagtttgattgctggtgtaattgctaatatcttccagtttgtattggtcaaggttctgcagagaagcagaaccagtaggaggtatatattaagagtttcaagctcatgtgaccgtgcgggctggcaagtctgaaatccgcagggcaggccatgcaggctggcaattcctgcagaatttgatgttgcaatactgagtcctaaggcagtcctggggcagaattccttcttccctgggaggcctcagtctgttctcttaaggccttcaactgattaaatgaggcctgcccaagttatagagagtaacctgccttactccgtcttctgatttaaatgttagtcacatctaaaaaatattttcgcagcagcatttccactggcttttgaccaaacatcaggccacaaagttgatccccaaaattaaccatcactctgtgcctgtaagggaggggctgggaaaggggagcaggtctccccaaggggtgaccttggctttgttcctcccaggcctggagtttattcggaaaagccagctggtccagcctgtggggccactggtggtgctgctgcccctggcgggtgggtacagccgcgtcctcaacgccgcctgccagcgcctggcgagggctggggtcgtgctggtcaccgctgccggcaacttccgggacgatgcctgcctctactccccagcctcagctcccgaggtaggtgctggggctgctgccccaaggcgcgggtagggggcggagggcggagggagggcgggcgggcaggcgggcttcttgtggcacgtgggcttcttgtggcacgttcctggaggccgaacccttctggctttggaaggagtcgtcagagacccccgccatgcgggaggctggggaggaaggggctcgaaacctccatcatcgcagagtctgaatagcagtggccccgccatgcgcccacgtagcggcgcctacgtagccacgcccccacgccccgtcctggccactctccctcctgaaggtcttctggtacccgccccctccccatctccatccccaggccctgcgtcctctgcccaatactctttgggcctccctgttgtccagctctctccgcggctccatgactgacaacttgagcaaggctaatgtgaatgggagcggttgagggctcagacctctcacccgaggaacatccacagagtgtgccgcatgcccggtgcagtgtggctgcggggacacagacacggagcctcggccctgaggagctggggggcagtgaccgtccctcctctgacccaccactcctccagtgtcaggacactgcgggtatctaggggaaggaatcttgttccacttcaagtctggaacttcaagtctgtgtgtgtgcgtgcgcgcgcgcgcgttgggggtgggggttgcagagcagatgcgtacctgacagcggtaacctaggtccccccggcctatcaaggcttccctggcggccgaatttaaaggcatcaagcaaacaaagcccaacacatctctgccttgtcctctcagtttccccccgtggcacttagaaccacttgatacaccgaatagtttccggtctatctcccccactaggatgtaaactccacaggggcattgggaatgctgcctggctatggtagggacagaggggagcaccagggcggggcaggggtgccagagttctgcctgggcagtcagattttccttaggaggggacatttgagtgggacccaaacaggtgtatagcagttgtccagcccagctggcaaggcctgagtctgcctctgcaacccctctcttgggctcctttctctgccacccacctcctcacctttccaggtcatcacagttggggccaccaatgcccaggaccagccggtgaccctggggactttggggaccaactttggccgctgtgtggacctctttgccccaggggaggacatcattggtgcctccagcgactgcagcacctgctttgtgtcacagagtgggacatcacaggctgctgcccacgtggctggtaagtcaccaccccactgcctcggccaccgtgatgctaacagcccctttggcagtcagggtctgtgccgggacctccagtgccaggctctgtgcagggggaccagagatgaagtaggcctgatggtgccttcaaggacactcagtctgatgagggaggcgagtgcacagagggaacacgaggtcagggctgtattagagggagcccagaggaggcacctgcccagcccgagggtcagagaaggcatcttggaggagggacatttgatcgggagcttgatggatgaataggagtttacctggccgataagacagcaactaccaaggcttagaggtgtgagaggaggctgtcttacctcactgagtaaggactgcaggcggcttaccttcgagaagagagcttagtgtctgtgtgcacgtgtgtttgtgtgtatgtgtgtgcgtgtgtgcactggcaggagtcccctgctggggcaggagggccgggccatcaccatctttcaccattcacccctgcaccaggcattgcagccatgatgctgtctgccgagccggagctcaccctggccgagttgaggcagagactgatccacttctctgccaaagatgtcatcaatgaggcctggttccctgaggaccagcgggtactgacccccaacctggtggccgccctgccccccagcacccatggggcaggtaagcaggatggcagggtgggcaagtccaggctggggcttgggaggtctgtgtgaccttgacagtctctcccttctcccttgtctgtgtaaggaggatgatgccaccttaaataggattaaatgagaatggggctctgaaagggctgtgcaatattttcataacgtgtttttatagagacagttgagtatgttctttaagccctcctctctcctaccatgaactaaagatttttgtggaggtcccctcactcccagcaccccctcctcatcccaggccctttttgcaggttggcagctgttttgcaggactgtgtggtcagcacactcggggcctacacggatggccacagccatcgcccgctgcgccccagatgaggagctgctgagctgctccagtttctccaggagtgggaagcggcggggcgagcgcatggaggtgactgtacccctccttcgtgtgtgtgtgtgtgtgtgtgtgtgtgtgtgtgcgtgtcagtgctgggccctcagggacccccagcaagcccctccatcctccagactccagctcttctgtaagcttacagggctggccagaccaggagtggggcactcctcacttcacgcggctgggggctgctggagagagccacagcgggaagggtttcctagaggctgcaggacagtgctggatggattttcaatgctcacctgggtgtgagcatgcggcagggccgcgtgagggtcagcgatctgctactctggactcagccatctctaggcccctctcactcaggtgctccatggttctgggagctgagaaatctcaaaccagcaaaaaagtggaattgatgttgatgctacaggatagtgcacagatgccatctggttgcagcattttggtggaagggcagtgcccagctaggagagtgaggaggggcaggcatttctggcttgaggagatagggtcttaatgctcgtgtgagaggcagagtgggtggagtggagctggctggatccttgctttggcctcctggatttctctctatctccattttgaaaccactctgtgtttggaagaacttttgagtattcagagctgcccactggcagaacagtcttccttgggcaggagtgagctccttgtccccagaaggctgggtctggctggcccctggcagggacactgatgagggtgcttgagttgatcctgtctagtccctttctgtgttttcaaagcccattctaaagcagattcccatttccgtctttgactctaaggcccaagggggcaagctggtctgccgggcccacaacgcttttgggggtgagggtgtctacgccattgccaggtgctgcctgctaccccaggccaactgcagcgtccacacagctccaccagctgaggccagcatggggacccgtgtccactgccaccaacagggccacgtcctcacaggtaggaggctgggcttgccctggggtgaggaggggtctctttctccttatgcacccactgcccacgaggcttggtcctcacaagtgtgatccatgagactcaagcctgacttgcagttccatactctggttctgccacttccatgccctttgagcctgggcaggtgaccttacttctcctcatctcagcttcctcctccataagagggaaaaaggtattacctgcctcattgtgttgcaaggagatgggcagcatctagggcactggcctggagtatcgcaggtgctttgcctaaggtggtgcagtccaggagaggcagctccagagagaggcccccggctggggctgaaaggagggcagacctcggtttgaatttcaccctgccgctcgatagctgtgtgacttgggcaaattacttaacatctctgtatgaggaaatgatgagtgctaagcacttagcttagtgccgggacaatataaattctagctatcgttactattgttttcatcacccgttgctttaaaatccagtctctggtataggcaactattgacgggctaccctgtgtcgaaaacatgcccaggcaggtagcaggaagtcacagatggggacctcttggggcatcaagggatggtgccctgaggctgagctgttctggttgggtggagcatgagaggtctgggaagacagtgggactccagcctggaataagaggctcagagttgattctcgtctgagcacgtccaggggaaccactgagggtttgggaacaggagagtgagggtgagaacctggttctgggcacagcaggctggcatgtaggatggatgttcaggaaagatgagcatagtcaggtggctggtgcccttgtccaggggagaggctccgtcaggttcaggggtcctggcttggagggaagtccgccatgctctaatcacgctcccctttggaagtgctcggccgatgagctcacaggcacatgtcagtttgaagtcatggaatctgactccatgaagcgcacctcaaagagcaccattttgcagctaagggaactgcaggctggacatgctgagtggctgccccgagcccttgcagctaggacatagagaatgctagtaaccacaaccctaccatgttcagagcacatgccaggctccatgctggggcttcgcacgtgtcatcttcacagtgtccctgtgagtaggtgtggtttctctttccatcttacaaatgagtaaacagagcctcagtgtagctaagtaaccactattttaggtttcttagccaatgggtgtgtctgactcctaagcccatggagggcattctgaggtggttcagacagaccccagcttacccttgaacttctgcctgctggctgcatagggaggggctggggggagtttgagcatctcaggccatagagcccctgcctcactgtctccatctctgggtggaaagatggtgttttccctgagaaactaaggctcagagaggttgaatggctctcccaaggtcacacagctggtcagctgcagagttgagaacacaggagtcctggtgctcaggccagcatctctttttttctttgagttgtttctaggtttcctagctcttgcctcagaccttaaagagagagggtctgatggggatgggcactggagacggagcatcccagcatttcacatctgagctggctttcctctgccccaggctgcagctcccactgggaggtggaggaccttggcacccacaagccgcctgtgctgaggccacgaggtcagcccaaccagtgcgtgggccacagggaggccagcatccacgcttcctgctgccatgccccaggtctggaatgcaaagtcaaggagcatggaatcccggcccctcaggagcaggtgaagaggcccgtgaggccgggtgggtggggtgctgcgtgtctctcctgcacagcttttctgtgtcagtttgtgccaccaccataccgccatacatcagggtggcggtttgccaggtagatgctgtgggcagcttccgccattgtgtggacagcatgtatatgtgtctctgtgtggctgggtctgtttttgcttttgtccagatcagtaaggtttgctacctgggtaccccactccacttggagtagagtgtgcataaatatggcataaagaaatgcaatatgcatgcatttattgattgatctatttttttctgagatggggtcttgctgtgttgcccaggctggtctcaaattcctgggctcaagcaatcctctggtctcagcctccccaagtgttgggattataggcatgagccgctgcacctggcctctctgatctatttaacaaacctgctgggagggtctcagggtcaggagcagcactgggctctgaggacacagagctcactcagccgtgacccagagggggtgcctgagctgcatgctgaaggttgttagcatgaccagcaaggcaagaaaaggccctgccgagattagcaaggcatgtgccaagccctggaatgtgacagccgggccttctagaaacctgagtgtataactctccttaaaagccagtaggagctccttaaaaggcagccctaaggagtccactcttaaatgaactcagagtcagttttaaaatgcaagtctgtgttgattctggtctggatggtgcattcctcgagagcaaaagacagtcttggtcttggatccacttgccctgggtacactgagggctgctaggttccaggtgctcttcctggcactggggagggatacaggcccaagagacatgctgttctccctcctggagcatctattttagtggaggaagacagaaaacaaaccattaatatagagtactgaaaagatgcgatggagaaaactatagcaaggaagggaatggggtgggagagaggtcaggagaggtctcgctgacaaggtggacgaaacaggccatgaggcagagaacatgttccaggcaaagcaaaggcccccaggtggggatgtgcagggagtaccaggaaaccagagaggtgggaatagttatgagatggggggtgcctcagaggggacagggccaagtcaggtgagacctgagggccacagtcagcagtgagctggggccatgcaggggtctggcctcagaggagtgtggtctggcctggatctgaacctctcactgtggcctagctgctgagctgagaagagatgacaaggaccttgggcagaagcagggagactggagggaggcggtggagggtccaggcgttggggcggggctcaggctggagtctgaagggagcctgcaggcctggtgggtggatgtgggtgggagagggggaggatggcaccaaggctcgggcccctggacagatggagttgccattaagtgggatggggcaggctatggggccatcagtttcagagggatgagtttggcactggcatggtaggcatctgtctatctccacggccctcaaaccaggcatgaagcaggagctcacgtgtttggtcagccatggtgcagaaccgcctgggtgggaggtgcggggtgggagatacacggttgtgtcccaaatgggctctgagccagcgagggccgtctgcactttggcctcacagaaggatgtcggagggagaaatgaagtgtgggtgggggtcccgggccacgctagacatgtgctttcttttcctcgggctctggcaggtgaccgtggcctgcgaggagggctggaccctgactggctgcagtgccctccctgggacctcccacgtcctgggggcctacgccgtagacaacacgtgtgtagtcaggagccgggacgtcagcactacaggcagcaccagcgaagaggccgtgacagccgttgccatctgctgccggagccggcacctggcgcaggcctcccaggagctccagtgacagccccatcccaggatgggtgtctggggagggtcaagggctggggctgagctttaaaatggttccgacttgtccctctctcagccctccatggcctggcacgaggggatggggatgcttccgcctttccggggctgctggcctggcccttgagtggggcagcctccttgcctggaactcactcactctgggtgcctcctccccaggtggaggtgccaggaagctccctccctcactgtggggcatttcaccattcaaacaggtcgagctgtgctcgggtgctgccagctgctcccaatgtgccgatgtccgtgggcagaatgacttttattgagctcttgttccgtgccaggcattcaatcctcaggtctccaccaaggaggcaggattcttcccatggataggggagggggcggtaggggctgcagggacaaacatcgttggggggtgagtgtgaaaggtgctgatggccctcatctccagctaactgtggagaagcccctgggggctccctgattaatggaggcttagctttctggatggcatctagccagaggctggagacaggtgtgcccctggtggtcacaggctgtgccttggtttcctgagccacctttactctgctctatgccaggctgtgctagcaacacccaaaggtggcctgcggggagccatcacctaggactgactcggcagtgtgcagtggtgcatgcactgtctcagccaacccgctccactacccggcagggtacacattcgcacccctacttcacagaggaagaaacctggaaccagagggggcgtgcctgccaagctcacacagcaggaactgagccagaaacgcagattgggctggctctgaagccaagcctcttcttacttcacccggctgggctcctcatttttacgggtaacagtgaggctgggaaggggaacacagaccaggaagctcggtgagtgatggcagaacgatgcctgcaggcatggaactttttccgttatcacccaggcctgattcactggcctggcggagatgcttctaaggcatggtcgggggagagggccaacaactgtccctccttgagcaccagccccacccaagcaagcagacatttatcttttgggtctgtcctctctgttgcctttttacagccaacttttctagacctgttttgcttttgtaacttgaagatatttattctgggttttgtagcatttttattaatatggtgactttttaaaataaaaacaaacaaacgttgtcctaa

SEQ ID NO: 621 - DNA, 6501 bp, Homo sapiens
tctgtttttgaaaaatttattttatactcttagaagctaagaactttgccacacatgaaccaaatttagaattaaggttcttccctagtgtatctacttccttttgaaattttataaacaagattttatacacaagaggtagcagaggaaaattccagtctgcttgttccaagctcagaaggtaactgcacacacctcgatgttagcagggaaggtggggcaggacagggtaagtctgatgatacggcactctagttcctaaaactgactgtagttgtcagtgaccgtgtgaggactccaggagaagtcgtggtgagatgcccgctgggatgcttgttttctttcccaggatgccttcaacgggcagaatcggccatcttaagatcggcctcactaagggagcttcttgagaacacacagcattattgagttaattgtgcaattcctgctctgtttgcagaccattttgaaaggtttataaaaacatcttcatccaaaaaattggcagtaaaaatgacaactcttccaaggtaagcctgtcataactgtcactgttgtactacattaaaaaaagtcatcagcaggttcattgactgtagctgtcagcaatcaagtggttaccagcaaagtgaaaacgatggtcattgcagcaacaatataagcaacatgatctgaagcgtataatatacacggtggacgatcctgatgaacctttacagtgaggacggcaggtgctaggggtgcggaaggcgttgtttccataggaaataaggggactagaagtggcaatttcactcctgattttgggctcctgagagtgcagtcgccagcgatgatatcccagtgtggatcatcgccagcatttcaaggtcatgtcccacacaatctcttggtgaggatgtgggcggagagaaggtgagaatagggtaggggaaacagtaggacaggaagtattcacgtactcaaaaccaatggtagaacatcacatttcaaactgcaagaccattggaaccgtctgaagtttgccactcgcctctgtccgtttctctaagggtacagttctgctcttaagtgctggcccttccatcttctcagtgtgtttgacaaaggccactgccaacctccagcaagtcacagaataacaatgaagtctgacagcacagaaaccctcactgccagagaatgaaaagactgggccatggcgagagcacagtaatgagatgccatctgcctggccacatgcccacacaatgccacagcagccagacaggcacttcagggctggctgcgcctctgtgacttggcaaatctgacagtgaaaacctggcacttcctaggctccctagttctgtgcatggtgagatgaaaataaggcaggacctgtaactaaaggcaaaacagggccgaaaatgtgagcaattcaaaatacaaaatgtacaaaatatatatgaaatatgtgggtgtaaacctctcccccacaccataaaagggagctggtataaatgagtgaatggtgctatactttggaaatacgactaaatggatggttattcaattgctttatatttatttctgggaaaataaatcttaaaccttgactgacttttcagtgttaattagtcatgttgaggagaaacaaattctcaaattccttctctgcattacaataactatgaaactcacaagcagtgtgtaccaactcaaatagttaacttcatatacaaccaataccaagggtttcagtaattatgttttaagcaaaagcaaacgattgcagatcacatgatttaagactacagtttattcaatatgtctccaagcattaaaaagataattctgtgaagttaaactcagtaaaattatatcttaaagtgcttttattttgctgtttttaaaatctgtttggggaacaactcataacttctttaagtaattgatgtcaaataatgcaccctgtacttctggagaacacagcattttcaaaattgctcttttcaatctaattatatcagaaaaatatcttcaagagcttagtatttcccaatttttgatcctgatcctggtaacctttcatcaagatccaagcttatgcatagggttctcatctagacccatctgaaattctatacaaatagggagacatattaaatacaaaggtctgtgtaaattgacttaattactattttacaatgaaaaggaattttattacatctttacatcattttaaattggatattcctgtttaatattactgcaagattaaaaatttgcccccacatatctaaaagcagcttgctttttcttaaaatataaaaaccaaaggaatttcttttgtagcatcgtagagaaagcaacagctttatgctcactcttgtatgttcgtgtaacaaaaaagtctgccactggctctatttccgaaaatctccacagaaatgtgaatccacatatagaccacgctcccgggacagctgatccacatgccggagttctcccactgccaaacagctcccaaaccttctagtggcttaaaaatgctttccttgagaaatacacgatccgcccaagtcacagcagctttcccagtccaatctccaggctcttccaaagggttcgagattctgattccaagaaggtgctgagcatccagtattgtgtcttgactcctctcaggctgggcatgttcctctagggatcaacatcatcaaggtcacttctcaactcaccaatcatcatgggagattctgaaccctgcagaaaagaaaaggaagttaaagttcatacggttagagaaaaggttttctatgctgacttgtgttctgcaatttaaacatgtcttcatctggcaacttaatgcaatgtttatcaaagggtaataaaatgtgataactattacatctaatatttgacaattcatgattatgtaaaacatgtacatttctatgatctcatttagtcagtgaaacaacccagcgacttgtctaaagtcacaatgctactctgcacccatgtgagaacgcagagcagtgataaagctgggagaggcattgatggccattgtgcccgcttcacgttgggcactgtgtgagcctccctgccctgcacctgccaaatatgggctctgggtcactcctgggtctgaaggctacctctgttaccatctgtgtggcctttggcttacacacttggcgaatcgttctgaatactcaccgtgtgccatggggctgatctagttggagctggggtggggaggagcaaggacagtctctctaaagtgacaacctaagctgagtgagagttgggggtgagtaggggggccctgaggtggaaggaagagagtacatttgataaataaaattcagaaaatgggccaggcacagtcgcttatgcctgtaatcccagctacttgggaggctgaggcaaggagaatcgctggaacctgggagaaggaggtagcagtgaggtgagattgcaccactgcactccagcctgggtgacagagcaacactccatctcaaaaaaaaaaaaaaaaaaaaaaaaaaatcagaaaatgggggtggggaggtgcgcaggtgctagatcaagcaggactgtgttgaggattctggcttttctcctcatacaaagcctttgaaaggttttagtgcatgaaccagagagaagcaggggtggaggtgaggggatccttacagacgtaggcagagaggggctgatgacaggtggaggagagggacgagcaccctttcaaagggagctgtccgggatgacatgggggtgctgtgtgtgagataaggaacactgacggagggccagctttggtgggcgcagggaggaggggctgggcacatcgagtctgaggtctttaaggtatgccaagtggagaacgtcaagaacaagagagctggatgttcatgttcagaaatccaaggtgggtgcggagagaatatggagtgagggcaggaggatacaggttagagactccacaaacctttactggtggtccagaagaggcagtactaggaaggagacagagaaggaacagccagaagggtttgaggaaaactacgagagagaagtgtcaggaaagccctggaatagtgtttcaaacgggaagagcgccaggagcgctagatgctgccgagcagtcggctaagatgaggcctgaaagctgcaggccacctgtcaccccaactgctgagttggagagaagagggagttagcagggaagaggctgaagagcgagtgagagataagaaaatggggaaagttaagtttagagaattagtcgaagtttggctgcaaagaagagaaaagaaggcaggggcaacagggagaagagaggctttgacagggcagaagagaggctttgacagggcagaagagaaaccagtgtgctgagacgtcgctgggaagggtctggcagggtggagcgttctggatattgaagagttacatacacattagaacgcaaagctctgccaaggtgggcggggatgagcgctaggggctttgggtggacagaggcaaacttcccactgtcacaggagaggagacaagaacagtgcagatgcttgggaattagtggccgcaggagctctcctgtgacagcttttattttctctgcaaatgaagtaggtgatgaggtaatgtgtggagtgaccttgggctaagtcacatcactgtgctgggctgcagttacctttctgtaaaatcagggtgacagctgcctcacatagtgcttatgaggatccgaaagataacacttaaaaaaaaatgacacctactacatcagtaacattcatttaatggggcctattctgtaccaagtactgtgaagggaccacagaggagactgctgttaaggaaagttacagactattggaaagacgtaatgattaactgacacttagttcagtgtttgcacacagtgggtgttcaatacatatttattttctttttctactataatgattggtattaaagctgtttttttttctttttttaaaaatacatgtcaaaattttcttggactcccctggcaagcaggtatacttcaagagcacgggagcttttctttcaagagtccacatttccaggaaggctggtgagagcaaacgagggactttcagtaacctggcaaggcagaataaagtgaacaagctggaacgaatccccctgtgccctggcttcatcgggactacctgcaggctgatcagggtggccagccacaaacacctcgaggccttccattcacttcacactgcagcactactcagccctgtaaacacacggttagtgcatatgctgagctgagatcactagagggcagcgctggtaactctttggactcacattccagaggaagcatcttgttttccctcagctgtggaaattctttttggaaagcttaagagcaaggctgccctttgcacacaaggacatgctgaccgttatacctgctgtagatgcctgtctccgttctcattggcaggactactctccgacccattactgcttcctgattgctctttttcattcaacaaagctgtggcatacgctaacgtgtcctgcagaagattcaaacacaagacgacaaagttagggcccattcagtggcagcagcaaccgccagggaagactacctttcatctgaccttcagtgggaccggaggcctgagagtgaggccttcatcacagtcaccagaaccccctcaacccctgtccctttttgtgaccagactgcccaacctgtatgactttccttctagacaaataatctgcacaaatttgtgtaagtgtacaccaatctgttttcttttcatagaaatccaattgtttcttctgcttgttctcatcttcaactcatacctctcttctcagaggttgcagtttctgagaaacacactgaaaatcctccataagtgatttagaccacgcaaaaacaagagacaactctcacctgagctgaaatggttcgctgaaaggtttttccagttgatgtttcattagagacattactctgtggtgtccagtaatgttctgacatctgagatgaaaggtcaaaaatgccatcagaggtgacaaataagcccccatgggttcacagtttctaccattagatattgagtcttaaaagcatcccaagtagggtacaagtctacccagaccttccatcacataaagcgattcaagacctcagtcaagtattgcttcttatatcatcatccctaccttttcccctatgaagttaagacatatgtattaggacaaatttaatgcacacaagatataaactgtagcaaagaaatgtttgaaatctgaaaacactttaaggtcagtctccatattcagttccagagatttttcctgacaagatgtgctattattgattcctatgttacagctagaaaaattcaatgttcagttaccttcttctgtagccactgcacagcccagctccagtggtgggaattctccttgaagtactccttagctgcaggacac

SEQ ID NO: 622 - DNA, 15090 bp, Homo sapiens
acgttccctacttcctgtgctcttgcggagacgcgcgcgtcggggtttaacgcgtttctgggccgccgtaagcccggcctaggggcagctttgactcgagagccggctataggcgcatggaaggttccctggaacgggaggcgccagcgggggcgctggccgccgtgctaaagcacagctcgacgttgccgcccgaaagcacccaggtccggggctacgacttcaaccgcggtgtgaattaccgcgcactgctggaggccttcggcaccaccggcttccaagcaaccaacttcgggcgcgctgtacagcaagtcaatgccatggtgaggaccgggcggaatttctagggacgcggaggggcgtggcttgtagaaccaacgcggtactagacgggggcagcgtttccagtggaggggatatgtcttttatttgagttgcccaatagttggaggaaggcgggacctattctgggcgggagtttctgtcctgggaaggggattttgcactctggtagttacatgctggtacggtaacctgaggaggcgaggactgattcttggtgtgggggcgggttctaggtacatttaaagctttctggaatgggcggagcctggggcaagacaaattaagggaggatatgggaggaggagcctaagtctgggcggttcttgaatttagatttgcttttcccagcggggaagggaccggatctgaaaggagatgctctctgattcctaaaagggtgggggctggctgggcgcggtggcgcatgcctataatcccagcattttgggaagccgaggcgggtggatcaagagaagaggagttcgagacaagcctggccaacatggtgaaaccctgtctctactaaaatgcaaaaaattagccgggcatggtgttgcgcgcctgtagtcccagctactcgggaggctgaggcaggagaatcgcttgaacccgcgaggtggaggttgcagtgagctgagattgcgccactgcactccagcctggtgacagagcgatactctgtctcaaaaaaaaaaaaaaaaaaaggccgggcacggtggctcatgcctgtaatctcagcattttgggaggccgaggcgggcggatcacctgaggtcgggagttcgagaccagcctgaccaacatggagaaaccccgtctctactaaaatgcaaaaaattagccgggcatggtggtgcgcgcctgtagtcccagctactcgggaggctgaggcaggagaatcgcttgaacccgggaggtggagcttgcagtgagccgagatcgcgccattgcactctagcctgggtaacaagagtgaaactccgtccaaaaaaaaaaaaaaaagggtgggggcaaatcctgaacgtgtgtcttgagatctggtctgggaaggggcagagtttacacaggagatgttccttggtcccctgtagaactggtcctgtatccctgaatgtgcagggcctggggtgaaatctgtttctggagcccacctggagtcctgagtctgggatttaaggccagtgcttaacttgacttggcccttactcacagatcgagaagaagctggaaccactgtcacaggatgaagaccagcacgcggacctgacccagagccgccgcccacttaccagctgcaccattttcctgggatatacatccaacctcatcagttcaggcatccgtgagaccattcgctaccttgtgcagcacaacatggtggggacctggtgaggccgtggccttggcctctgggtcaatgggcaatgcagttattgatcgtttaagtgagatgggcagataggggtctgttataagcagaggaatagaatcaagttttgttttgtagcagagctccctcataagagtcactggacaaggatgaggttagaagttctgcccagaatgagggcaggggcttccttcttgggccaaattcactgccttgtggctgcaggtggacgtattggtgaccacagctggcggcgtggaggaagacctcatcaagtgcctggcgcccacatacttgggcgagtttagcctcagggggaaggagctccgggagaacgggatcaataggtgagaaccctgagtggtgttgggcaggggagctggaccaagggtcctggggcctgatgcctacatgcctcctgttctcaggatcggaaacctgctggtgcccaatgagaattactgcaagtttgaggactggctgatgcccattctggaccagatggtgatggagcagaacacagaggtggggctggggcaacctggaggggccagttcagtgggagtcaggggaggcatggcctgaaggtcacatcctctcctagggtgtaaagtggacgccttctaagatgatcgcccggctgggcaaggagatcaacaacccagagtccgtgtattactgggcccagaaggtgaggacctaagcgggagcaaagtagccagactttggcatgtgttaacttatttcatctttccagcctcctggggattcagtactgttattctcagcatcctcactcttagatgaggagactcaaacacagataggcgtggtaattttttttttttttgagacaggatcttgctctgtcacctaggctggagtgcagtggtgtgatcacagctcattgcagcctcaacctcctggggccaagcagtcctcccacctcagcctctcgagtagctgggaccacaggcacatgccatcatgcccagctaattttaaaaattttttgtagagatgggggtctccctgtgtttcccaggctggtcttgaactcctggcgtcaggcagtcctcccaccttggcctcccaaagtgctgggattacaggcgtgagccactgtgcccagccaggctaggtaattttgtctgaagtcacacagataactagtggggcctcagcatccttatgctcctcccagactatctctggaacagtagaggcaacacttagcaactctcctggggcctggctcagggtcccacactcccagatgctataaaataagagctacccactccctttaattagagaatcagaacctgaaaaaaaaaaaaaaaaagctacatagtctttttttttttttttttttttttgagacagagtcttgctctgtcgcccaggctggagtgtaatggtgtgatttcagctcactgcaccctccacctcccaggttcaagtgattctcccgcctcaccctcctgagtagctgggactataggcacccaccatcatgcccggccaatttttgtatttttctacagatggggtttcaccatgttggccaggctggtcttgaactcctgacctcaagtgatccacccgccttggcctcccaaagtgctgggattacaggggtgagccaccacacccagcctacttactctttcttttttacgagacagggtctcattctgtttcccaggctggagtgcaatggcacaataatggctcactgctgtcttgagcttctgggctcagtcgattctcctgcctcagcctgctgagtagctgggactacaggtgcgtgccaccatgcctggctaattgtttttgtagagatgggaactcaccatgttgcacaagctggctctttttttttttttgagacggagttttgctcttgttacccaggccagagtccaatggcgcaatcttggctcacagcaacctctacctcctgggttcaagcaattctcctgcctcagcatcaagttcccaagtagctgggattataggcatgtgccaccacccctggctaattttgtatttttagtagaggcagggtttctccatgttggtcaggctggtgtcgagctcctgacctcaggtgatccacccgcctcggcctcccaaagtgctgggattacaagcgtgagccaccgcgcccggccacaagctggctctttaaaaaagaattagacggccgggcacggtggctcatgcttgtaatcccagtactttgggggctgaggcgggtggatcacctgaagtcaggagttcaagaccagcctggccaacatggtggaaccctgtctctactaaaaaaacaaaatgcaaaattagctgggcatagtggcatgcgcctgtaatcctagctactcgggaggctgaagcaggagaatcactggaacccaggaggcagaggttgcagtgagctgagatagtgccattgcactccagcctgggcaacgagtgaaactccgtctcagggaataaaaaaaaagagagagaaacagctcagcaagctaagaataggctggttctttatgtgccaggcactatactaagtgttttctgtgggttttctcatataggcctcatctgtgagaggtgtttctgttatgcttataattgaggaaacagtcctagagaaattaggcaccccatccacagtcagatagtcatatagccagcatggagacgaggctctgagctccagccactgtcctgtcatgttctctgcagaaccacatccctgtgtttagtcccgcacttacagacggctcgctgggcgacatgatcttcttccattcctacaagaacccgggcctggtcctggacatcgttgagggtgaggcgctagggccacagaggagaggggaaggagggctggctgagtccaaggcctgacttcggcgctcttcccccagacctgaggctcatcaacacacaggccatctttgccaagtgcactgggatgatcattctgggcgggggcgtggtcaagcaccacattgccaatgccaacctcatggtgagtgggggtggcgcttcggcccactctgcagacatgctgtgtggtgggcctatgccatgtgctgggtagacagcatgaactagacaggccaggatccctgctccccgggactgatgttctagtaggggagatagcaaacaagtgacatccacgtcagggggcagtcattgctacggggaatactaaatgatggcatgagaagagaaaggggtgctgtccaacaagaggttttggaaggaggcttctggaagtgtgagctgggagcaggggtttggggaggcatctcccaggagctatgtggttgtctcccgtgccaggagtttgtgctgctgtactagcattgagcttctggattgcaaagttcccaggagagggaacagccattgcaaaggctctggggcgcctgaagtaatccaggaacagctgggtacctggtgaggggaaggtggagtggtgagggccaggaggtgatgcagggaggtgccacagggagcctgctgggccctgtgggctgaggcggggctttggcttttgcactgagagaagtgggagaggacttgactcgggttcccatgctccccctggtggccatgtggtgaacagatggtggcaggtgagtgagaactccagtccaggacagtggtgaccatgcagggatcaggaggcaggcggtggttggatttggagggcttctgaagatagagttgctggcagctcctgccttgcagatggggcagggttgttgacacctggctgttgggtctggggaaacacagccatcgttgcccagcagctctagtgaccccagacattgacatgggccctgtctgggagcgaatgtctgtgaagggcttccttcatctgggacacacctctcagcctgtttggctacggtgtcctccctctgtgtctgtctcctgtgactggctgactgggcccaccgtgcccccgcctccccacagcggaacggggccgactacgctgtttacatcaacacagcccaggagtttgatggctctgactcaggtgcccgaccagacgaggctgtctcctggggcaagatccgggtggatgcacagcccgtcaaggtaagcgctggctgggtggggcatagggtctctgggacgatgagtgtgggtcccatggcttacccaggttcccccctacccaggtctatgctgacgcctccctggtcttccccctgcttgtggctgaaacctttgcccagaagatggatgccttcatgcatgagaagaacgaggactgagcggctgcggtcccaggaaggtcttaccccctcttctatttattaatttgcagacccagcccctcccctactttttggtcagctacgtctctagaataagatggtatctgaagtccttccatgtctgtgtctcggtccttggtcctgttggtgggtcccctggcttcagcctgctccatcctctgcctcataggcctcctctcgccagcactggacgctgcctcccatggcggtcagcaggcagggctctgttgggtggtaggccagcgactgcaccacaccggaacccacaggcagggccagagccagcgcaccctgtggagcgaggggtagggagtggttatctgtggctgggctgtaccctggtttctgaggtccctgggcaccccccatctcagtcctgcctgaagccctcagtcacctctccccgaccttcagccacctgcctctaattgcctcctagacactgcaaaattaatctacctcagactgagcccctcagtagctctgtcctaccaggtgttcaggccgcaagtcttgggagcctcttattgattttttattttttaaaatagcagagatggggtcttaccatgttgcccaggctggtctcgaactcctggcctcaagtgatcctcctgccttggcctcccaaagtgctaggactacaggtgtgagccaccatgcctggctttgggagtctttttctttttctgtttttttttgagatggagtcttgctctgtcgccaggctggagtgcagtggcgccatctgggctcactgcaacctccgactccctagttcaagcgattctcctgcctcagcctcccgagtaggtgggattacaggcacgcgctaccatgcccagctaatttttgtatttttagtacagatggggtttcaccatgttggccaggatgatctctatctcctgacctcgtgatccacccccctcggcctcccaaagtgctgggattacaggtgtgaaccaccatgcctggccgggagtctttttcttgtaccacatgttcctctatcagttattcctcttggctctgcttctagaccatgtccagagactgctgattttctgccactaccatgtttggagcatgccttgctcacagcttgcctgttccctgccaccagctgggctccatcctgtccatttggcagccccaatgatccccacttcccctggtcccaacacaatgtaaacagttcctcaagcaagccatgcttcctctttccaccttgaaaatgtcccttgatgtgcctgccctccaaggcaacttctgttctactgggcccataagaaataggtggaacattcttgctaccttagttcctaaagcaagagcttgtccgccaagtcttcagggcccccccggttccctccatcctcttatgggccttagttcccctggccaagcccagcgctgatgtctcctttgccgagattcccccggctctgaccccactacaccaggatggtctgtttctggcctgactccccaccaggctgggacatgtcaaggacagggctcagggcttgaaaccatgcacagggatgctaagatgtagctccagtttcttgaatgactgcagccctatctcacccaaggttagacatggccgtcggctcccccttgcccaggggtcagtgccagttgctcggcctggcatctgcagcccagcctgaccccggatcttgccgcacctgccgccaccctgaagcctttgtttcctgactgatgcatgcgcaggctacacctcttaacatatgctgttccctttgcctggaatgcccttcctgcctcatcttctctctagcccaagctgggcacggtgtctcaggcctgtaatcccagcactttgggaggccgaggcgggtgaatcacttgaggtcaggagtttgagaccagcctggccaacatggtgaaaccctgtctctactaaaaatacaaaaattagccaggtatggtggtaggggcctgtaatcccagctactcaggaggctgagacatgagaatcacctgaaccctggggggaagaggttgcagtgagctgagatggcgccactgcatttgcctgggcaatagtctcaaaaaaagaaaaaagggccgggtgtggtggcttacgcctgtaatcctagcacttgggaaggctgaggtgggtggatcatgaggtcaggagtttaagaccagcctgaccaacatagtgaaaccctgtctctactaaaaatacaaaaattagctgggtgtggtggcacgcacctataatcccaactactcaggagactgaggcaggagaatcgcttgaacttgggaggcggagtttacagtgagccaagattgcgccactgcactctagcctgggcgacagagcaagacttgtctcaaaaaaaaaaaaaaaaaaaaaaaaaagatcctagccttcaggccctggagtgactgaggtaaggacagggctgagatggggcaggcatctaggtatgaagtagggctgggggcacctcacctccaccaggtcccagaagaacaccttcccgtcctcagaacagctgaccacatgtgtgtcacgctcgctcaggcagcagtccagcttgtattcctggttcttatggcccttgtacctaagggtggacaggatcggggggcttggtcctctccaggggtgggagaggagggaaggggatccccacgaccacaaggactcactcgcccagcagctcccctgtgtctttgtccaggagccgcaatgtggagtccaggctggacaccagggtgcactgcccatcccggctgaagcaggtgcaggtgatggggccttgggggaagggtgggtaggtgagtgagggtggggtgcccctggttggccccccatcttccctgcctgtcccacatccccagccacactcactgcccacgtagtctgagaagagctgccccatccttaggtcatagcgtctcacgcggccatccacggagctgcaggagagggtagatccagcgggaaccttgactacactcacatggctccaggcagccctgtgccttcccagcccagtgggcctgctcttccagtgcacaggagtggaattctgaagctctggccttgagactcaggcccagggccaattacgtcctactccatcatttccaagacccacaccccctttccaagcccttggagtccttctgattcccccttttcttccttttgtttgagacagagttttgctcttgttgctcaggctggagtgcaatggcatgatcttggctcaccggaacctctgcctcccgggttcaagagattctccttcctcagcctcccgagtagatgggaatacaggcatgcaccaccacgccctgctaattttgtatttttagtagagacggggtttctccatgttggtcaggctggtctcgaactcccaacctcaggtgatccgcccacctcagcctcccaaagtgctgggattacaggtgtgagccaccccacctggcccaattcccccttttcctgcattctccagctcctcctcctcagtactcagtcccaccactttccccactacccagcaccagcatctagactgttctggtctccctgcaccccccacagccaccagagggagcacttttcaaagtacagttgacccatgaacaacacggtttgaactgaacgcgtccacttatatgtggattttcttctgcctctatcagctgtgagacaccaagatcaatccctcctcttcctcctcctctgctttctcaacacgaagatctttatgacgatctcttcacttccacttaatgaatagaaaatatattttttccaccaggcgcggtggctcacgcctgtgattccagctctttgggaggccagggcaggtggatcacgaggtcaagagatggagaccctcctggccaacatggcgaaaccccgtctctactaaaaatacaaaaattagctgggcgtggtggcacgcgactgtagtcccagctactagggaggctgaggcaggagaatcgcctgaacctagaagttagaggttgcagtgagccgagatcacgtcactgcactccagcctggcaacagagcgagactgcgtctcaaaaaaaacaaaaattcttccttatgattatttttatgtatttatttatttaatttatttacttattttgagacggagtcttgctctatcgcccaggagtgtagtggtgcgatgtcggctcacagcaagctctgcctcctgggttcactccattctcctgcctcagcctcctgagtagctgggactacaggcgcctgccactatgcccggctaattttttgtatttttagtagagacggggtttcaccgtgttagccagaatgatctcgatctcctgacctcatgatccgcctgcctctgcctcccaaagtgctgggattacaggcatgagccacagcgcccggcctatttttatttatttttagaaatcattttatctttttttttttgagatggagtctcactttgtcgcccaggctggagtgcagtggcacaatctcggctcactgcaacctccaactcccgggttcaggcgattctcctgcctccgcctcccgagtggctgggattacaggctcccgtcaccacacctggctaatttttgcatttttagtagagacggggtttcaccatgttggccaggctgatctcaacctcctgacctcaagtgatctgcccaccttggcctcccaaagtgctgggattacaggtgtgagccaccgtgcccggccagattattattattttgtagacagtctgtctttcacccagcatggagtgcaatggtgcctcgaactcttggactcaagtgatccttccacttcagcctcccaagtagctgggattacagctgtgtgccactgtgcccagctgagagtaggttttaatctgagcatgggggcagctatgattccccgtagcacctggggtgagaccaggtcctggctccactcaccctgccaggatctcgtggtctgacaccttcacactggacacgccatctctggcctcatccagcgtctgcactggctcaggcctccgtgagcggcaatcccaacagcggatactggaatcaatagagcctgtgaggccagcatgatggtgaggtcaggtttggagggggagggcagcaccctgggcccccgtgcttaggccccagactcaccggacaggataactgtggcctcttcattaaactgcaccgtgttcaccttctgagaaagttattgccactcagaggaggctggactttggaggactgggataaaggcagggttcccagtgtcggttaaagcaagggcgaaggggaggtgaaaggttttgggggaacagcaaggacaggggttggtgactgcctagcctggcatgcggagtgggggatcgtcatctggggaagggatccttacggtgtaatgggggtggccgtgtcaccacctatgcgctaatacgggtcccctccactcaaatgagggtctccaggctttcactcacccctgcgtggccccggaatttgcgcacgacctgccctgatgccacatcccacagaaccaccgccttgtccccgccgccggagcagagactactgttgtcaaaggagctggagtaaaggaggaggaggatcagcatcgacctcggatcccagcctcagcgctcccatcccagcctggtccccggctcacccggccgcatccagcacctcgtagccgtggccgctgtacgtccgcagcagcgtcccccgaagcgggttccacagcttcagcgtcttgtcactgccgcacgtcaggcagtaattgccatccactggggaacaccaggcgggggttactgggccgtcgatctcaggaggcgggaggaggacccggaatgaagacgaaggcgctcaccattaaatcgtacggctcgcactgccccctgcccgcagtccagcgtcttcaaccgtttctgcggcagctctggaggccgcggctttggctcagggaaagccatgctcccaggactccttccttgcagccttaaatcggtctgtacggaaaattccgcgccttagaaacccacgcttgggtgtaaccttattattgttcttcctgacctacttcctgtttatcacttccgggttcatcattttggcatttcggtgatcgggttggaactattgaagcccgctttcaggttcttttccccattttccctttgaaaggaagacttctggcttctcctaaatctccgttctctgggtaaggggagtccaagcctctgtcatgaggaacggaaatgcgagggcctcgggtgttactctaaaatccgccctcagcttgcacgccggaagctgcgattcctgcagcggaagaggcgtgatctggccttcgactcgctatgtccactaacaatatgtcggacccacggaggccgaacaaagtgctgaggtgaggaccccagcgtcgtgggcacgggttcgggttgtgggtgtggatcggggccctgggaagcgcctgtctatcccgggggcaggacctgagcgcccctgaccctcgagcctgtcgcaggtacaagcccccgccgagcgaatgtaacccggccttggacgacccgacgccggactacatgaacctgctgggcatgatcttcagcatgtgcggcctcatgcttaaggtgggcggggttgagcttctatgggtgtagttggacctgagaacgaggcccgggggcgggtttggaatgaagcggggtgtcttgtcattgctgatggggcgggacctgagatcggccgggagtggggctgcgatgacgctgggccgagaaagccccagtctttggtgaagtcaaggattcgagtcaggttggggatgtggcagattggtctgcgagtggggccaggctttgaagcaacttggagaggagttgtggaaaaagggcagggtcttaagcatgtgggatgtcagagtctctcttggtcctgagagacgcaggccagacagtaggactagaaaccacgtatctagagtatgccatgagcaggtgggactgaggaattccgggtggggcaaggtcccagctgcatcagatggaatcagtgggcatgatctggtgtctggaaaggtggcttcggggactcattgttgtgcctttcactaacctgcccacccacttacctttccctagctgaagtggtgtgcttgggtcgctgtctactgctccttcatcagctttgccaactctcggagctcggaggacacgaagcaaatgatgagtagcttcatgtgagacttgccctacagaacaagtgactcttgagtaaggggtggggggaccccagcctggccatcctagactgacacctctctcctgtctcaggctgtccatctctgccgtggtgatgtcctatctgcagaatcctcagcccatgacgcccccatggtgataccagcctagaagggtcacattttggaccctgtctatccactaggcctgggctttggctgctaaacctgctgccttcagctgccatcctggacttccctgaatgaggccgtctcggtgcccccagctggatagagggaacctggccctttcctagggaacaccctaggcttacccctcctgcctcccttcccctgcctgctgctgggggagatgctgtccatgtttctaggggtattcatttgctttctcgttgaaacctgttgttaataaagtttttcactctggctgtcagcctcttctgttcagtggggtgttcctcctacctggcgggaagggctctagccccataggcctggtgtggggccccagtctggaggcttctggctgttcatttgcttacttcataaaccttgtgtcttaagtcaggtgctagggacaagacagtgacttctgccctctggcaactcaccagatggccctgctgacctagataatctaggctttggtttccttttttttttttcctttttaagaaagaaaatggtcttgatctgtcatgcaggctgagtgcagtggcacaatctatgttcactgcagcctcaaactcctgggctcaagcaatcctcccacctcagcctgccacgtaactgggaccacaaatgcgtgctaccatgcccagttaattcttgttttttttgagacagagttttgctcttgttgcccaggctggagggcaatggcatgatcttgatctcggctcactgcaacctccgcctcccaggttcaagtgattctcctgcctcagtctcccaagtagctgggattacaggcatgtgccaccatgcccagctaatttttgtatttttacattttgtgtaaaattacaaattttgtgttttcaaacccgtctctacaaaacaacccatgttgcccaggctggtctcaaactcccaggcccaagtgattcaccagcctggccctcccaaagtgctgggattgcaggcttgagccactgcgcctgccctgggctttgttttcttatcagagaatgaactggtaggaattgggaaaggcatgaaagactcggggtccttccccacttgtcagaccctcttttctctccggaacacccagggatccttctcaaccaggctggatcccatccctggtactccaggggtatttacccaacgtcccaatccccacagtataggactcttcatcagatcctcctcttaggcaagctaggtccttccaggaccctagcgctgaaggtccatgggacggacaccctggattcccatggacacactacaccggctaggaaaacccggcccccttaggaaaagcacttctgctcctaccggcattaagaggcattccgtcttggaattccggcattaagaggcattccgtcttcatagcccgtgagacgccagtgtcacctttagcccaaccagtgccctgagggtggcattttcctaccttcctgtaacgacccccgggattgcccagggctacagcctctctcccgtgagcctccagaccgcgccctggccccgcc

SEQ ID NO: 623 - DNA, 15090 bp, Homo sapiens
acgttccctacttcctgtgctcttgcggagacgcgcgcgtcggggtttaacgcgtttctgggccgccgtaagcccggcctaggggcagctttgactcgagagccggctataggcgcatggaaggttccctggaacgggaggcgccagcgggggcgctggccgccgtgctaaagcacagctcgacgttgccgcccgaaagcacccaggtccggggctacgacttcaaccgcggtgtgaattaccgcgcactgctggaggccttcggcaccaccggcttccaagcaaccaacttcgggcgcgctgtacagcaagtcaatgccatggtgaggaccgggcggaatttctagggacgcggaggggcgtggcttgtagaaccaacgcggtactagacgggggcagcgtttccagtggaggggatatgtcttttatttgagttgcccaatagttggaggaaggcgggacctattctgggcgggagtttctgtcctgggaaggggattttgcactctggtagttacatgctggtacggtaacctgaggaggcgaggactgattcttggtgtgggggcgggttctaggtacatttaaagctttctggaatgggcggagcctggggcaagacaaattaagggaggatatgggaggaggagcctaagtctgggcggttcttgaatttagatttgcttttcccagcggggaagggaccggatctgaaaggagatgctctctgattcctaaaagggtgggggctggctgggcgcggtggcgcatgcctataatcccagcattttgggaagccgaggcgggtggatcaagagaagaggagttcgagacaagcctggccaacatggtgaaaccctgtctctactaaaatgcaaaaaattagccgggcatggtgttgcgcgcctgtagtcccagctactcgggaggctgaggcaggagaatcgcttgaacccgcgaggtggaggttgcagtgagctgagattgcgccactgcactccagcctggtgacagagcgatactctgtctcaaaaaaaaaaaaaaaaaaaggccgggcacggtggctcatgcctgtaatctcagcattttgggaggccgaggcgggcggatcacctgaggtcgggagttcgagaccagcctgaccaacatggagaaaccccgtctctactaaaatgcaaaaaattagccgggcatggtggtgcgcgcctgtagtcccagctactcgggaggctgaggcaggagaatcgcttgaacccgggaggtggagcttgcagtgagccgagatcgcgccattgcactctagcctgggtaacaagagtgaaactccgtccaaaaaaaaaaaaaaaagggtgggggcaaatcctgaacgtgtgtcttgagatctggtctgggaaggggcagagtttacacaggagatgttccttggtcccctgtagaactggtcctgtatccctgaatgtgcagggcctggggtgaaatctgtttctggagcccacctggagtcctgagtctgggatttaaggccagtgcttaacttgacttggcccttactcacagatcgagaagaagctggaaccactgtcacaggatgaagaccagcacgcggacctgacccagagccgccgcccacttaccagctgcaccattttcctgggatatacatccaacctcatcagttcaggcatccgtgagaccattcgctaccttgtgcagcacaacatggtggggacctggtgaggccgtggccttggcctctgggtcaatgggcaatgcagttattgatcgtttaagtgagatgggcagataggggtctgttataagcagaggaatagaatcaagttttgttttgtagcagagctccctcataagagtcactggacaaggatgaggttagaagttctgcccagaatgagggcaggggcttccttcttgggccaaattcactgccttgtggctgcaggtggacgtattggtgaccacagctggcggcgtggaggaagacctcatcaagtgcctggcgcccacatacttgggcgagtttagcctcagggggaaggagctccgggagaacgggatcaataggtgagaaccctgagtggtgttgggcaggggagctggaccaagggtcctggggcctgatgcctacatgcctcctgttctcaggatcggaaacctgctggtgcccaatgagaattactgcaagtttgaggactggctgatgcccattctggaccagatggtgatggagcagaacacagaggtggggctggggcaacctggaggggccagttcagtgggagtcaggggaggcatggcctgaaggtcacatcctctcctagggtgtaaagtggacgccttctaagatgatcgcccggctgggcaaggagatcaacaacccagagtccgtgtattactgggcccagaaggtgaggacctaagcgggagcaaagtagccagactttggcatgtgttaacttatttcatctttccagcctcctggggattcagtactgttattctcagcatcctcactcttagatgaggagactcaaacacagataggcgtggtaattttttttttttttgagacaggatcttgctctgtcacctaggctggagtgcagtggtgtgatcacagctcattgcagcctcaacctcctggggccaagcagtcctcccacctcagcctctcgagtagctgggaccacaggcacatgccatcatgcccagctaattttaaaaattttttgtagagatgggggtctccctgtgtttcccaggctggtcttgaactcctggcgtcaggcagtcctcccaccttggcctcccaaagtgctgggattacaggcgtgagccactgtgcccagccaggctaggtaattttgtctgaagtcacacagataactagtggggcctcagcatccttatgctcctcccagactatctctggaacagtagaggcaacacttagcaactctcctggggcctggctcagggtcccacactcccagatgctataaaataagagctacccactccctttaattagagaatcagaacctgaaaaaaaaaaaaaaaaagctacatagtctttttttttttttttttttttttgagacagagtcttgctctgtcgcccaggctggagtgtaatggtgtgatttcagctcactgcaccctccacctcccaggttcaagtgattctcccgcctcaccctcctgagtagctgggactataggcacccaccatcatgcccggccaatttttgtatttttctacagatggggtttcaccatgttggccaggctggtcttgaactcctgacctcaagtgatccacccgccttggcctcccaaagtgctgggattacaggggtgagccaccacacccagcctacttactctttcttttttacgagacagggtctcattctgtttcccaggctggagtgcaatggcacaataatggctcactgctgtcttgagcttctgggctcagtcgattctcctgcctcagcctgctgagtagctgggactacaggtgcgtgccaccatgcctggctaattgtttttgtagagatgggaactcaccatgttgcacaagctggctctttttttttttttgagacggagttttgctcttgttacccaggccagagtccaatggcgcaatcttggctcacagcaacctctacctcctgggttcaagcaattctcctgcctcagcatcaagttcccaagtagctgggattataggcatgtgccaccacccctggctaattttgtatttttagtagaggcagggtttctccatgttggtcaggctggtgtcgagctcctgacctcaggtgatccacccgcctcggcctcccaaagtgctgggattacaagcgtgagccaccgcgcccggccacaagctggctctttaaaaaagaattagacggccgggcatggtggctcatgcttgtaatcccagtactttgggggctgaggcgggtggatcacctgaagtcaggagttcaagaccagcctggccaacatggtggaaccctgtctctactaaaaaaacaaaatgcaaaattagctgggcatagtggcatgcgcctgtaatcctagctactcgggaggctgaagcaggagaatcactggaacccaggaggcagaggttgcagtgagctgagatagtgccattgcactccagcctgggcaacgagtgaaactccgtctcagggaataaaaaaaaagagagagaaacagctcagcaagctaagaataggctggttctttatgtgccaggcactatactaagtgttttctgtgggttttctcatataggcctcatctgtgagaggtgtttctgttatgcttataattgaggaaacagtcctagagaaattaggcaccccatccacagtcagatagtcatatagccagcatggagacgaggctctgagctccagccactgtcctgtcatgttctctgcagaaccacatccctgtgtttagtcccgcacttacagacggctcgctgggcgacatgatcttcttccattcctacaagaacccgggcctggtcctggacatcgttgagggtgaggcgctagggccacagaggagaggggaaggagggctggctgagtccaaggcctgacttcggcgctcttcccccagacctgaggctcatcaacacacaggccatctttgccaagtgcactgggatgatcattctgggcgggggcgtggtcaagcaccacattgccaatgccaacctcatggtgagtgggggtggcgcttcggcccactctgcagacatgctgtgtggtgggcctatgccatgtgctgggtagacagcatgaactagacaggccaggatccctgctccccgggactgatgttctagtaggggagatagcaaacaagtgacatccacgtcagggggcagtcattgctacggggaatactaaatgatggcatgagaagagaaaggggtgctgtccaacaagaggttttggaaggaggcttctggaagtgtgagctgggagcaggggtttggggaggcatctcccaggagctatgtggttgtctcccgtgccaggagtttgtgctgctgtactagcattgagcttctggattgcaaagttcccaggagagggaacagccattgcaaaggctctggggcgcctgaagtaatccaggaacagctgggtacctggtgaggggaaggtggagtggtgagggccaggaggtgatgcagggaggtgccacagggagcctgctgggccctgtgggctgaggcggggctttggcttttgcactgagagaagtgggagaggacttgactcgggttcccatgctccccctggtggccatgtggtgaacagatggtggcaggtgagtgagaactccagtccaggacagtggtgaccatgcagggatcaggaggcaggcggtggttggatttggagggcttctgaagatagagttgctggcagctcctgccttgcagatggggcagggttgttgacacctggctgttgggtctggggaaacacagccatcgttgcccagcagctctagtgaccccagacattgacatgggccctgtctgggagcgaatgtctgtgaagggcttccttcatctgggacacacctctcagcctgtttggctacggtgtcctccctctgtgtctgtctcctgtgactggctgactgggcccaccgtgcccccgcctccccacagcggaacggggccgactacgctgtttacatcaacacagcccaggagtttgatggctctgactcaggtgcccgaccagacgaggctgtctcctggggcaagatccgggtggatgcacagcccgtcaaggtaagcgctggctgggtggggcatagggtctctgggacgatgagtgtgggtcccatggcttacccaggttcccccctacccaggtctatgctgacgcctccctggtcttccccctgcttgtggctgaaacctttgcccagaagatggatgccttcatgcatgagaagaacgaggactgagcggctgcggtcccaggaaggtcttaccccctcttctatttattaatttgcagacccagcccctcccctactttttggtcagctacgtctctagaataagatggtatctgaagtccttccatgtctgtgtctcggtccttggtcctgttggtgggtcccctggcttcagcctgctccatcctctgcctcataggcctcctctcgccagcactggacgctgcctcccatggcggtcagcaggcagggctctgttgggtggtaggccagcgactgcaccacaccggaacccacaggcagggccagagccagcgcaccctgtggagcgaggggtagggagtggttatctgtggctgggctgtaccctggtttctgaggtccctgggcaccccccatctcagtcctgcctgaagccctcagtcacctctccccgaccttcagccacctgcctctaattgcctcctagacactgcaaaattaatctacctcagactgagcccctcagtagctctgtcctaccaggtgttcaggccgcaagtcttgggagcctcttattgattttttattttttaaaatagcagagatggggtcttaccatgttgcccaggctggtctcgaactcctggcctcaagtgatcctcctgccttggcctcccaaagtgctaggactacaggtgtgagccaccatgcctggctttgggagtctttttctttttctgtttttttttgagatggagtcttgctctgtcgccaggctggagtgcagtggcgccatctgggctcactgcaacctccgactccctagttcaagcgattctcctgcctcagcctcccgagtaggtgggattacaggcacgcgctaccatgcccagctaatttttgtatttttagtacagatggggtttcaccatgttggccaggatgatctctatctcctgacctcgtgatccacccccctcggcctcccaaagtgctgggattacaggtgtgaaccaccatgcctggccgggagtctttttcttgtaccacatgttcctctatcagttattcctcttggctctgcttctagaccatgtccagagactgctgattttctgccactaccatgtttggagcatgccttgctcacagcttgcctgttccctgccaccagctgggctccatcctgtccatttggcagccccaatgatccccacttcccctggtcccaacacaatgtaaacagttcctcaagcaagccatgcttcctctttccaccttgaaaatgtcccttgatgtgcctgccctccaaggcaacttctgttctactgggcccataagaaataggtggaacattcttgctaccttagttcctaaagcaagagcttgtccgccaagtcttcagggcccccccggttccctccatcctcttatgggccttagttcccctggccaagcccagcgctgatgtctcctttgccgagattcccccggctctgaccccactacaccaggatggtctgtttctggcctgactccccaccaggctgggacatgtcaaggacagggctcagggcttgaaaccatgcacagggatgctaagatgtagctccagtttcttgaatgactgcagccctatctcacccaaggttagacatggccgtcggctcccccttgcccaggggtcagtgccagttgctcggcctggcatctgcagcccagcctgaccccggatcttgccgcacctgccgccaccctgaagcctttgtttcctgactgatgcatgcgcaggctacacctcttaacatatgctgttccctttgcctggaatgcccttcctgcctcatcttctctctagcccaagctgggcacggtgtctcaggcctgtaatcccagcactttgggaggccgaggcgggtgaatcacttgaggtcaggagtttgagaccagcctggccaacatggtgaaaccctgtctctactaaaaatacaaaaattagccaggtatggtggtaggggcctgtaatcccagctactcaggaggctgagacatgagaatcacctgaaccctggggggaagaggttgcagtgagctgagatggcgccactgcatttgcctgggcaatagtctcaaaaaaagaaaaaagggccgggtgtggtggcttacgcctgtaatcctagcacttgggaaggctgaggtgggtggatcatgaggtcaggagtttaagaccagcctgaccaacatagtgaaaccctgtctctactaaaaatacaaaaattagctgggtgtggtggcacgcacctataatcccaactactcaggagactgaggcaggagaatcgcttgaacttgggaggcggagtttacagtgagccaagattgcgccactgcactctagcctgggcgacagagcaagacttgtctcaaaaaaaaaaaaaaaaaaaaaaaaaagatcctagccttcaggccctggagtgactgaggtaaggacagggctgagatggggcaggcatctaggtatgaagtagggctgggggcacctcacctccaccaggtcccagaagaacaccttcccgtcctcagaacagctgaccacatgtgtgtcacgctcgctcaggcagcagtccagcttgtattcctggttcttatggcccttgtacctaagggtggacaggatcggggggcttggtcctctccaggggtgggagaggagggaaggggatccccacgaccacaaggactcactcgcccagcagctcccctgtgtctttgtccaggagccgcaatgtggagtccaggctggacaccagggtgcactgcccatcccggctgaagcaggtgcaggtgatggggccttgggggaagggtgggtaggtgagtgagggtggggtgcccctggttggccccccatcttccctgcctgtcccacatccccagccacactcactgcccacgtagtctgagaagagctgccccatccttaggtcatagcgtctcacgcggccatccacggagctgcaggagagggtagatccagcgggaaccttgactacactcacatggctccaggcagccctgtgccttcccagcccagtgggcctgctcttccagtgcacaggagtggaattctgaagctctggccttgagactcaggcccagggccaattacgtcctactccatcatttccaagacccacaccccctttccaagcccttggagtccttctgattcccccttttcttccttttgtttgagacagagttttgctcttgttgctcaggctggagtgcaatggcatgatcttggctcaccggaacctctgcctcccgggttcaagagattctccttcctcagcctcccgagtagatgggaatacaggcatgcaccaccacgccctgctaattttgtatttttagtagagacggggtttctccatgttggtcaggctggtctcgaactcccaacctcaggtgatccgcccacctcagcctcccaaagtgctgggattacaggtgtgagccaccccacctggcccaattcccccttttcctgcattctccagctcctcctcctcagtactcagtcccaccactttccccactacccagcaccagcatctagactgttctggtctccctgcaccccccacagccaccagagggagcacttttcaaagtacagttgacccatgaacaacacggtttgaactgaacgcgtccacttatatgtggattttcttctgcctctatcagctgtgagacaccaagatcaatccctcctcttcctcctcctctgctttctcaacacgaagatctttatgacgatctcttcacttccacttaatgaatagaaaatatattttttccaccaggcgcggtggctcacgcctgtgattccagctctttgggaggccagggcaggtggatcacgaggtcaagagatggagaccctcctggccaacatggcgaaaccccgtctctactaaaaatacaaaaattagctgggcgtggtggcacgcgactgtagtcccagctactagggaggctgaggcaggagaatcgcctgaacctagaagttagaggttgcagtgagccgagatcacgtcactgcactccagcctggcaacagagcgagactgcgtctcaaaaaaaacaaaaattcttccttatgattatttttatgtatttatttatttaatttatttacttattttgagacggagtcttgctctatcgcccaggagtgtagtggtgcgatgtcggctcacagcaagctctgcctcctgggttcactccattctcctgcctcagcctcctgagtagctgggactacaggcgcctgccactatgcccggctaattttttgtatttttagtagagacggggtttcaccgtgttagccagaatgatctcgatctcctgacctcatgatccgcctgcctctgcctcccaaagtgctgggattacaggcatgagccacagcgcccggcctatttttatttatttttagaaatcattttatctttttttttttgagatggagtctcactttgtcgcccaggctggagtgcagtggcacaatctcggctcactgcaacctccaactcccgggttcaggcgattctcctgcctccgcctcccgagtggctgggattacaggctcccgtcaccacacctggctaatttttgcatttttagtagagacggggtttcaccatgttggccaggctgatctcaacctcctgacctcaagtgatctgcccaccttggcctcccaaagtgctgggattacaggtgtgagccaccgtgcccggccagattattattattttgtagacagtctgtctttcacccagcatggagtgcaatggtgcctcgaactcttggactcaagtgatccttccacttcagcctcccaagtagctgggattacagctgtgtgccactgtgcccagctgagagtaggttttaatctgagcatgggggcagctatgattccccgtagcacctggggtgagaccaggtcctggctccactcaccctgccaggatctcgtggtctgacaccttcacactggacacgccatctctggcctcatccagcgtctgcactggctcaggcctccgtgagcggcaatcccaacagcggatactggaatcaatagagcctgtgaggccagcatgatggtgaggtcaggtttggagggggagggcagcaccctgggcccccgtgcttaggccccagactcaccggacaggataactgtggcctcttcattaaactgcaccgtgttcaccttctgagaaagttattgccactcagaggaggctggactttggaggactgggataaaggcagggttcccagtgtcggttaaagcaagggcgaaggggaggtgaaaggttttgggggaacagcaaggacaggggttggtgactgcctagcctggcatgcggagtgggggatcgtcatctggggaagggatccttacggtgtaatgggggtggccgtgtcaccacctatgcgctaatacgggtcccctccactcaaatgagggtctccaggctttcactcacccctgcgtggccccggaatttgcgcacgacctgccctgatgccacatcccacagaaccaccgccttgtccccgccgccggagcagagactactgttgtcaaaggagctggagtaaaggaggaggaggatcagcatcgacctcggatcccagcctcagcgctcccatcccagcctggtccccggctcacccggccgcatccagcacctcgtagccgtggccgctgtacgtccgcagcagcgtcccccgaagcgggttccacagcttcagcgtcttgtcactgccgcacgtcaggcagtaattgccatccactggggaacaccaggcgggggttactgggccgtcgatctcaggaggcgggaggaggacccggaatgaagacgaaggcgctcaccattaaatcgtacggctcgcactgccccctgcccgcagtccagcgtcttcaaccgtttctgcggcagctctggaggccgcggctttggctcagggaaagccatgctcccaggactccttccttgcagccttaaatcggtctgtacggaaaattccgcgccttagaaacccacgcttgggtgtaaccttattattgttcttcctgacctacttcctgtttatcacttccgggttcatcattttggcatttcggtgatcgggttggaactattgaagcccgctttcaggttcttttccccattttccctttgaaaggaagacttctggcttctcctaaatctccgttctctgggtaaggggagtccaagcctctgtcatgaggaacggaaatgcgagggcctcgggtgttactctaaaatccgccctcagcttgcacgccggaagctgcgattcctgcagcggaagaggcgtgatctggccttcgactcgctatgtccactaacaatatgtcggacccacggaggccgaacaaagtgctgaggtgaggaccccagcgtcgtgggcacgggttcgggttgtgggtgtggatcggggccctgggaagcgcctgtctatcccgggggcaggacctgagcgcccctgaccctcgagcctgtcgcaggtacaagcccccgccgagcgaatgtaacccggccttggacgacccgacgccggactacatgaacctgctgggcatgatcttcagcatgtgcggcctcatgcttaaggtgggcggggttgagcttctatgggtgtagttggacctgagaacgaggcccgggggcgggtttggaatgaagcggggtgtcttgtcattgctgatggggcgggacctgagatcggccgggagtggggctgcgatgacgctgggccgagaaagccccagtctttggtgaagtcaaggattcgagtcaggttggggatgtggcagattggtctgcgagtggggccaggctttgaagcaacttggagaggagttgtggaaaaagggcagggtcttaagcatgtgggatgtcagagtctctcttggtcctgagagacgcaggccagacagtaggactagaaaccacgtatctagagtatgccatgagcaggtgggactgaggaattccgggtggggcaaggtcccagctgcatcagatggaatcagtgggcatgatctggtgtctggaaaggtggcttcggggactcattgttgtgcctttcactaacctgcccacccacttacctttccctagctgaagtggtgtgcttgggtcgctgtctactgctccttcatcagctttgccaactctcggagctcggaggacacgaagcaaatgatgagtagcttcatgtgagacttgccctacagaacaagtgactcttgagtaaggggtggggggaccccagcctggccatcctagactgacacctctctcctgtctcaggctgtccatctctgccgtggtgatgtcctatctgcagaatcctcagcccatgacgcccccatggtgataccagcctagaagggtcacattttggaccctgtctatccactaggcctgggctttggctgctaaacctgctgccttcagctgccatcctggacttccctgaatgaggccgtctcggtgcccccagctggatagagggaacctggccctttcctagggaacaccctaggcttacccctcctgcctcccttcccctgcctgctgctgggggagatgctgtccatgtttctaggggtattcatttgctttctcgttgaaacctgttgttaataaagtttttcactctggctgtcagcctcttctgttcagtggggtgttcctcctacctggcgggaagggctctagccccataggcctggtgtggggccccagtctggaggcttctggctgttcatttgcttacttcataaaccttgtgtcttaagtcaggtgctagggacaagacagtgacttctgccctctggcaactcaccagatggccctgctgacctagataatctaggctttggtttccttttttttttttcctttttaagaaagaaaatggtcttgatctgtcatgcaggctgagtgcagtggcacaatctatgttcactgcagcctcaaactcctgggctcaagcaatcctcccacctcagcctgccacgtaactgggaccacaaatgcgtgctaccatgcccagttaattcttgttttttttgagacagagttttgctcttgttgcccaggctggagggcaatggcatgatcttgatctcggctcactgcaacctccgcctcccaggttcaagtgattctcctgcctcagtctcccaagtagctgggattacaggcatgtgccaccatgcccagctaatttttgtatttttacattttgtgtaaaattacaaattttgtgttttcaaacccgtctctacaaaacaacccatgttgcccaggctggtctcaaactcccaggcccaagtgattcaccagcctggccctcccaaagtgctgggattgcaggcttgagccactgcgcctgccctgggctttgttttcttatcagagaatgaactggtaggaattgggaaaggcatgaaagactcggggtccttccccacttgtcagaccctcttttctctccggaacacccagggatccttctcaaccaggctggatcccatccctggtactccaggggtatttacccaacgtcccaatccccacagtataggactcttcatcagatcctcctcttaggcaagctaggtccttccaggaccctagcgctgaaggtccatgggacggacaccctggattcccatggacacactacaccggctaggaaaacccggcccccttaggaaaagcacttctgctcctaccggcattaagaggcattccgtcttggaattccggcattaagaggcattccgtcttcatagcccgtgagacgccagtgtcacctttagcccaaccagtgccctgagggtggcattttcctaccttcctgtaacgacccccgggattgcccagggctacagcctctctcccgtgagcctccagaccgcgccctggccccgcc

SEQ ID NO: 624 - DNA, 3830 bp, Homo sapiens
ctgggcacggtggctcatgcctgtaatcccagcactttgggaggctgaggtgggcggatcacgaggtcaggagatcaagaccatcctggctaacatggtgaaaccccgtctctactaaaaatacaaaaaattagctgggcgtgtggcgggcgcctgtagtcccagctacttgggaggctgaggcaggagactggcgtgaacccgggaggtggagcttgtagtgagccgaaatcacaccactacactccagcctgggcgacagagcaagactccgtctcaaaaaaaaaaaaaaaaaaaaaaaagctctctgattttagctgttaggtgggagatgggttggaggataccaaagccagcttgcaggctatggggataaagaaaacacctggatttcggacctactttataggtagaggttggcagacatgctgagaaggatggatgtggggtgtgagaaaaggggagacagcaagctgcgctcctcatttttaatttttatttatctatttttgagacggagtttcgctctgttgcccaggctggagtgcagtggcaccatctcagctcactgcaacctccacctcccgggttcaagtgattctcctgcctcagcctcctgagtagctgggattatgggtgtgcgccaccacacccggctaatttttgtattttttagtagagacggggtttcgccatgttgtccaggctggtctctaactcctaacctcaggtgatctgccctccttggcatcccaaagtgctgggattacaggtgtgagccaccgcgcccagccccaatccctatttttcagtctagtggatgagtggagggtggggccgtttgctgagatgcagaaagatcagggataggtggagagggagctgagggggcaactttgaggtccaagcgaggatgtcaaggaggatgtctgtctcctccaacaaggtaggctcattccagcctcacggcttttgctgttctgtcttcccatgtgcaggaaatggcctctctgcatcttcacatacggggattttctcagccttctggctttggctcaaatctcacctccttggcgtccttcacccatccctccaactaaaatcccgaactcctccacctaaagactcaaattatcctgtttaaatcctgattgcgctgggcgcggtggctcacacctgtaatcccagcactttgggaggccgaggcaggcagatcacctgaggtcaggagttcgagactagcctgaccaacatagtgaaaccccatctctactaaaaatacaagaattagccgggcgtgatggctcatgcctgtaatcccagctactcgggaggctgaggcaggagaattgcttgaaactgggaggcagaggttgcgatgagtggagatcgcgccattgcactccagcctgggcaacaagagcgaaactctgtctccaaaaaaaacaaaaaacaaaaaaggcctgatagcactcaccactattgttaactttctatcttcccaatcagattgtgggctccagtagggcagggtccacatcttggtcttgttcaccactaaatccttagtgcctagcacggagcccaccatagagaatagactacatgaattgtagagtgagtgaataatcctgttggccgtatgcactgttaggagggtgtgtttgagatacagatgacacccagggtctcacattcttgcaggagggaaagagacgtcagccctgggtcccagaagaggccactgacccagtgggagttcagggaaggcttcccagaggaggtggaggtgacagctgcagctataagggaaggaagaacagagcgttatgcagcatgtgaaggctttggagacttgtgagggcacgaaccgggctcactatcccattagacaaaagtggctgaggaaggatgaaactgtgtctaactctgcctggtgaccgaaatcttgtccatgggtgacgcttaagaagtgaccctcggccgggcgcagtggctcacgcctgtaatcctggcactttgggaggccaaggcgggcgggtcacgagttcaggagatcgagaccatcctggctaacacggtgaaaccccatctctactaaaaacagaaaaaattagccgggtgtggtggcgggcacctgtagtcccagttactcgggaggctgaggcaggagaatggcatgaacctgggaggcagagcttgcagtgagccgagattgcgccactgcactccagcctgggcgacagagcgagactctgtctcaaaaaaaaaaaaaaaaaaaaaagtgaccctcataaaaaaattagctgggcacgatggtgcacactagtcggaatgctggggtgggaggatgacctgagtccgggagtcagaggttgcagtgggccgagatcgcgtcacagcactccagcctggcgacagagtgagaccctatcaaaaaatagcagcaggccaggcgcggtggctcatgcctgtaatcccagcactttgggaggctgaggcgggcggatcacgaggtcaggagatcgagactaccctggctaacacggtgaaaccccgtctctactaaaaatacaaaatattagccgggcgtggtggccggcgcctgtagtcccagttactggggaggctgaggcagaagaatggcgtgaacctgggaggcggaggttgcagtgagccgagatcgtgccactgcactccagcctgggagacagcgcaagactctagctcaaacaaacaaacaaacaaaacagcaacaacaacaacaaaaccatcctcccctcccgaggggacagaacagaaacgaatgggcgagtgccgggccaagcagtgggtctccagcaggtggcattaaaataggaattttggctggggacggtggctcacacctgtaatctcagcactttggaaagcccaggcgggcggtcacctgagggcagaaccagcctcgccaacatggtgaaatgccatctctactaaaaataaaaaattagccaggcctggtggtgggtgtctgtaatcccagcaactcgggaggctgaggcaggagaatcgcttgaaccaggggggcagaggttgcaatgagtcaagattgcaccaccgcactccagcctgcgtaacaagagcgtgtaactcttgtctcaaaaataaattaaataaataaataataaaaataaaaaagaatcttcattcatgggaagtcgagaacacatgaaaacaagtaaaggccgaagcgcagtggctcacgcctgtaatcccagcactttgggaggctgaggcgggcggataacctgaggtcggaagttcgagaccagcctgaccaacagggagaaaccccgcctctactaaaaatacaaaattagccgggcatggcggtgcatgccagtagtcccagctactcgggaggctgaggcaggagaatcgcttgaacccggaatgtggaggttgtggtgagctgagatcgggcaattgcactccagcctgggcaacaagagcgaaaccctgtatcaaaaaaaaaaaaaagaaaaaaaaaggaagaaaaggcctaaaggcgccgggcgcggtgggtcacgcctgtaatcccagcactttgggaggccgaggcgggcgaatcacgaggtcaggagatcgagaccaggtgaaaccccgtctctactaaaaatacaaaaaaattagccgggcgtggtggtgggcgcctgtagtcccagctactcgggaggctgaggcaggagaacagcgtgaacccggaaagcggagctggcagtgagctgagatcgcgccactgcactccagcctgggtgacagagcgagactccgtctcaaaaaaaaaa

SEQ ID NO: 625 - DNA, 20245 bp, Homo sapiens
gcctttccagggccggggaaccccaggaggaagctgctgagccatgggcgcctacgcgcgggcttcgggggtctgcgctcgcggctgcctggactcagcaggcccctggaccatgtcccgcgccctgcggccaccgctcccgcctctctgctttttccttttgttgctggcggctgccggtgctcgggccgggggatacgaggtgagtggggcctccgagctgaaacgtacaggaggcagagtgaaacccagaatacagtctagaggtgtgggtgggtctgtcctgtgggtgtctagtgaatggctgatgatatgacagtgtggtctgagtgcgtgctttgtgtcattgcgaggtctggctgtgcgcatctgagtataggactgtgtctgattgtacctgcctccgtgtctccgggatgcttgcctagactttgtctgcacttaactgtgggattggaggggcaggaggtggcagggggtgagcagtgtatgtgtggggggaggtgctggctgagagctgggactctggagtctgcctgaaattccagcctagctcttacacttcctgagtgtgtgacgttgggcaagtcacctatcctctctaagcctcagtgccttcatctggaaactggggataacatcaccccacctcccacggtggccgtctgctgtcggcaaatgctgaacaaacatcagctacttctattattattttcccggagtgtgaatgagagctgccctgtggggttgtgcaaagtggagttgtatctatgagcacaactatgtatgtgtgtgtcctgcctgggagggcctggcctcctctgcacataggcgagatcaggcctctctgagtcactcacctctagatcaagacttactctgcagcccccgacctcgggggttattgacaaggtatgtgtgtttggggtccctgtgcagacatgccccacagtgcagccgaacatgctgaacgtgcacctgctgcctcacacacatgatgacgtgggctggctcaaaaccgtggaccagtacttttatggaagtgagtagaggatggggactggtccctgggatccccatggtccctgtaatccctctgggtcctggacattagggtggggccagtgctaccctaatatccagggtttgggctcctctgtctaggaataacccccttggctctgctgttccctgagagccttatccctgttatccacagtcaagaatgacatccagcacgccggtgtgcagtacatcctggactcggtcatctctgccttgctggcagatcccacccgtcgcttcatttacgtggagattgccttcttctcccgttggtggcaccagcagacaaatgccacacaggaagtcgtgcgagaccttgtgcgccagggtgagcctaccccaaggaagtgaaaagaggaagcccagcccagcttctgcttctgcatctctggtttctgagatttgtcatgccacgtgcaagctgtataacatgcgtgtcgctccgcctgcctggactctccatttggagacctcctatacatcccacaaagccccacctgctgtgcatcctctgggaagcctgccatgcagggggcctctttcccatatctgggaactatggcctgggagcgacccctcttgtccttccgccagaaatgtgtacacaggcaggctttcacattcccagtatcacccaccctactcccactcctggctctgaccgctgaccctgaccttgcctgtcctggcacagggcgcctggagttcgccaatggtggctgggtgatgaacgatgaggcagccacccactacggtgccatcgtggaccagatgacacttgggctgcgctttctggaggacacatttggcaatgatgggcgaccccgtgtggcctggcacattgaccccttcggccactctcgggagcaggcctcgctgtttgcgcaggtgcgacccgggacctctcttgggcccacttcttcactcactctggctcctccctcgcccagtcaaaccccgccctctccctgcaatctcacaaggaccaggcccaggcctaggcctgttgaagccctgccccttgagtgagccgtaaagccagtggcttttgagctctggcctcagccggctatgcccagcccaggctgacccagctccggctggctccgccctctcccctaataggcccctcttggtgttctggccccacccactagctcgggtcctggctcctccctaaaccgggtggcaagtggatgcctaggctgccttaaaaacaggttcattacctgtgctcagaccccatccatcctcaggctgtggaagggggaacctcattcctggagtcaggcctgctctgcgctttgacagtgctggggaggtgaacctgggttctgatgttggacccgccctctccctgctagcccaaggtggtgagttctgaaacttccccaagcttggaaataagctggaggcctctctgtttcagccctacgtgtttttgtttttgttttttgagacagggtcttgctgtcatccaggctggagtgcagtggtgcaatcctaactcactatagcctcaatctcccggattcaagcgattctcctgtctcagcccccctagtagatgagactacaagagcgcaccactacgcctggctaatttttaaattttttgtagacagtctgcccgtgttgtgcaggctggtctcaaaaactcctgggtttaagtgatcctcctgttttggcctcccagaaggctgggatcataggcaagagccaccacatcgacctagcactgctttttaacctgtgctctgacctgcccctcccaagcagaggggagtttggtggtgagagggctgggcactaattcacactgccttttcctccctcatccccagatgggcttcgacggcttcttctttgggcgccttgattatcaagataagtgggtacggatgcagaagctggagatggagcaggtgtggcgggccagcaccagcctgaagcccccgaccgcggacctcttcactggtagggggcttggtgagggcagggccagccatggtgccacacactcagaagggccctgggcttgatatctgctctgttgtcactgtcctggaattcctatagtctgggaacaaaggccctgcatttccttttgcattgggacacaaattctgaagcccatcctgggtgggacatggccggctttgaaaccagggaaggtctgggtgatgggccaccccttgaacttggtgtgacctgcaggtgtgcttcccaatggttacaacccgccaaggaatctgtgctgggatgtgctgtgtgtcgatcagccgctggtggaggaccctcgcagccccgagtacaacgccaaggagctggtcgattacttcctaaatgtggccactgcccaggtaaccctggtgtccagaaccttcgagtccggtatatacaatacaatgagctctttccatggtacaggcatcccctaacacgttctccttatttttaatttttttgagacagtcttactctgtcacccaggctggagtgcagtggtgcgatctcggctcactgcaacctctgcctcctgggttcaaacaagcacatccagctaatttttgtatttttgcactggggtctcatcatgttgtccaggctggtctcaaactcctgagctcaagtgatctgcttgcctcggcctcccaaagtgccgggattacaggcatgagccaccgcacctggcctctatttttaacatttttatttatttattattatttttttttttttgagacagagtcttgctctgtcacccaggctggagtgcagtggcatgatctcagctcactgcaacctccgcctcccgggttcaagcgattctcctgcctcagcctcctaagaagctgggattagaggcacctgccaccacacccagctaatttttgtatttttagtagacagggtttcgtcatgttgaccaggctggtcttgacctcaggtgatctgcccgcctcaacctcccaaagtgctgggattacaggtgtgggccactgtgcctagtctatttttaacatttttattgagaattccttttttattttttttagactcactctgtcgcccaggctggagtgcagtggcacgatctcggctcactgcaacctccacctactgggtccaagcgattcttctgcctcagcctcccgagtagctgggattacaggtgcccaccaccatgctcggctaagttttatgtctttttagtagaaagggggtttcaccatattggccaggctggtctcgaactcctaaccttttgacccacagccttggcctctcaaagtgctgggattacaggcgtgagccaccgcgtccagcctttaacatttttataattaaaaaacattattttttcacagagataaggtctcaccatgtggcccaggctggtctcaaactcctgaactcaagtgatcctcctgccttggcctcccaaagtgctaggatataggtgtgagccaccatgcctggcataacacgttctccttaaaaaaatttttttttcctttctttaaaaattgatggctgggcatggtggctcacgcctataatcccagcattttgagaggccgagatgggcagatcatctgaagtcaggagttcaagaccagcatagccaaaatgacgaaaccctgtctctactaaaaatacaaaaattagtcgggtgtggtggcgcacgcctgtaatcccagctacttgggaggctaaggcaagagagtcgcttgaacctggcaggtggaggttgcagtgagccgagatcacgtcacttcactctagcttgggcagcagagtgaaactctgtctcaaaaaaaaaattgttttagattaattttttttttttttcttgagacagggtcttgctgtgtggcccaggttggtcttaaactcctagactcaagcgatcctcctgcctcagtctcctgagtagctgggattacaggtgtgagcccctgtaatcatgttctcatgccccctggaggaagatgctattctattcaccatcacaatgtccccctcctggatttatgtgcattcctcattagaagagatagcataggctgggcaagagatagcatggcatggtgactggatgccctcttctaggtagtgggtccaagagaactgctcaacaactggtggctacttttatctgtgtccccacgctcccaagtgccatacccccacccatgcctgtgcacccaacatccttgaccccatatacatcaaaacacagctatacacagggatggcccaggatcctctggcttcaggactcccctcttgcctgcagggccggtattaccgcaccaaccacactgtgatgaccatgggctcggacttccaatatgagaatgccaacatgtggttcaagaaccttgacaagctcatccggctggtaaatgcgcaggtcagtgcgcctaccctgtggtacccttgtgcacatgtgcgcttgcatccgggggccttgggttatgtgcatagctctcagtgctgtctttgttttctattgttctattgtggtcattctataacaaatgaccacacacttagcagctcaaaacaacagaaatacattgtcttacagttctgtaggtaagaagtccagcatgaggccgggcgcaatggctcatgcctgtaatcccagcatgttgggaggctgagccgggcagatcacgaggtcaggaattcgagaccagcctgaccaacatggtgaaacgctgtctctactaaaaatacagaaattagctgggtgtgatggtgcgtgcctgtaatcccagctactcgggagcctgaggcaggggaatctcttgaatccgggaggcggaggttgcagtgagcggagattgtaccactgcactccagcctgggccacagagaaagactctgtctcaaaaaaaaaaaaaaaaaaaaaaaatccagcctgagtctcaccaggctataatcaaggtgttggcaaggctgtgttccttctgcagtctctaggagagaatataatttccttgctttttccaacatctagaagttacccacattcaaaatctattcttggctccatcttcaaagccagccacatagcatctttctgaccctgtttctgtaatcacatccctttctctcattctcacctcttctgcctctctcttccacattttatttatttacttagagacggagtctcgctctgtcgcccaggctggagtgcagtggcgtgctctcggctcactgcaacctccgcctcctgggttcaagtgattcttctgtctcagcctcccaagtagctgggactacagtcgcgtgccaccacgcccagctaatttttgtatttttagtagacagggtttcaccatgttggccaggatggtctcgatttcttgacctcgtgatccaccccgctcggcctcccaaggtgctgggattacagatgtgagccactgtgtggcctaatttccctactttaagtttggctgatgaacaacctcaattccatctgcaaccttaattccccttttgccatgtaatctaatgtggtaataggttctggggatcaggacatggacacttttgggcagttatcattttacccaacacagatgtgttagtgttttgcactaagtggcctgtggctgtggctgtgtgcacagtcagtcactctcatcagcacagaaacttgtctcccctctcccatctcagacaccccttcccatcaatcttgtcctcactacggtgcaatctccattcccaccttccactcgctcccagcactgctatttcaccaaaacagctcttttatgtcatttatttttatttattttttctttttaaaattttatttatttatttatttattgagacaagagtcttgctttgtcacccaggctggagtgcagtggcatgatcttgcctcatggcaacctctgcctcctgggttctagtgattctcctgcctcagcctcccaagtagctgggactacaggcatgtgccaccaaccctggctaatttttgtatttttagtagaggcagggtttcactatgttggccaggctggtctcaaaactcctgacctcaggtgatccgtccgccttggcctcccaaagtgttgggattgtaatctgaggtgggcggatcacttgaagacaggagttggagaccagcctggccaacatggtgaaaccttgtctctactaaaaatactacaaattaggtgggcgtgatggcactcatctgtaagaccagctactcggcaggctgaggcaggagaatcgctggaacctgggaggcggagtttgcagccagctgagatcgtgccactgcactccagcttgggcgacagagtcagactcagtctcaaaaaaaaaaaaaaaaaaaaaagtttattgagcacctactgtgtacattgggggacacagctcgtgcaaaacaaacatccttttcctcacataggtcactttcttgttcctccaccttgctcaggtgaaagtgcacctccattcattataaaaattgtgtctaggccgggcacggtggctcatgcctgtaatcccagcactttgggaggctgaggcgggcggatcatgaggtcaggagatcgagaccatcctggctaacacggtgaaactccgtctctactaaaaaatgcaaaaaattagccgggtgtggtggcgggcacctgtagtcccaggtactcatgaggctgaggctggagaatggcgtgaacccaagaggtggagcttgcagtgagctgagattgagccactgcactacagcctgggcaacaaagtaagactccgtcccaaaaaaaaaaagttgtgttttttggtaacaatctgacagtcctgcaaaacgattattcctgccctataatgtcacacttagtttttccacaaaagtttttaataataaagttggaattattgtaaaagtttagtaaaatttcaggtttattcttgcatctctgaaatccttttaaaaaaggctagtggtcatgtttgacttcagccaaaattcattttcacacccaaccattggcttgcacgccaaatatgtatttagagaaactgaacctatgggatgcatgaatgtgcacacatgtgtggaagtgtgggcccccaggaaggtgcggactcccgagggctcactccgtcgcctcccccagcagcaggcaaaaggaagcagtgtccatgttctctactccacccccgcttgttacctctgggagctgaacaaggccaacctcacctggtatttggggaaactggggagcttgggggggttggcatgccccgtgggtcatgaccctgccctcaatgcccctgccgctgtaggtcagtgaaacatgacgacttcttcccttacgcggatggcccccaccagttctggaccggttacttttccagtcggccggccctcaaacgctacgagcgcctcagctacaacttcctgcaggtgggtaggagccgggctagagggggcatgcagccccgaggcccgacaggctgggcgccccaacatacccctctgcctccaggtgtgcaaccagctggaggcgctggtgggcctggcggccaacgtgggaccctatggctccggagacagtgcacccctcagtaagtgtcgggcccaagaggggaagaggtttgcggctgaagttggaaaccacccctaggccgcccccctcgagtttcttctttttttttttttttttttttttttttgagacggagtctcgatttgtctcccaggctggagtgcagtggtgcgatctcggctcactgcaagctccacctcccgtgttcacgccattctcctgactcagcctcccgagtagctgggactacaggcgcccaccaccacgcccggctaattttttgtatttttagtagagacggggtttcaccatgttagccaggatggtctcgatctgacctcgtgatccgcccgcctcggtctctcaaagtgctgggattacaggcgtgagccaccgcccccagccgtcctcgagttccttcttaaagcctctaagaatcctgcccgccagcaccggacctttcgcttccccttggggtctcagctgagtcccacagaacctcaccggactcattgtctatgagcagatgaggcgatggctgtgctccagcatcacgacgccgtcagcggcacctcccgccagcacgtggccaacgactacgcgcgccagcttgcggcaggctgggggccttgcgaggtgcgcggggcgagacttgggagacacgggggtggagacaggaaggggcggggccagggcctgggaaaggggacagagacaggtgtgaggcgtagccgagagccctgtggcggggctacaagggctcgtgggggcggggcttgtaggaggcggggaaagatacaggaacggggcggggctttggaggggggaaggaggcggggcgtgggcaagaggaggcggagacagctatggggtatagtcaagggcagcagggtggggctagaaggggttttggggcgactcttgagggaggcgggacagagaccggaacggggcggggcctgaggagaggggaggagtcaggcctggcgtcctgaacccaccggtccctttgcgctcttccgcaggttcttctgagcaacgcgctggcgcggctcagaggcttcaaagatcacttcaccttttgccaacagctaaacatcagcatctgcccgctcagccagacggcggcgcgcgtgagccgggacgggaggggtggatctagggcagatgggctttagagggggtagttggaaaatgtttttggaggactatacaggagtgaaattacgtgggctgcgaagctgggtcagcagagagaacaacgcatctcgagggggcttggccttaagtgccgtgaccacactaggaccagccaggggtgtttctgtgcaaagtgggtgggtttggagaaggcctgctgtgacccatgccctctctgacccccgcctccccagttccaggtcatcgtttataatcccctggggcggaaggtgaattggatggtacggctgccggtcagcgaaggcgttttcgttgtgaaggaccccaatggcaggacagtgcccagcgatgtgagcccaaacaacgaatattcccccgctgggactcctcccccagtgggcatttcctcatcgcccccatggatatcgcctgcttccatgaatacctcccactcatgcatatctcttcccccctcttgtatcttctccctctgccccttaatatcagtctccccttgggaacatatgcctcctgtgagtggtcctcccttttttttttttttttgagacggagtctcgctctgtcacccaggctggagtgcagtggcgcgatcttggctcacttcaaactccgcctgctggattataggcatgagccaccgtgcctggctggtcctccattttaataccccgcttccccaggaaaatttattgctgtttatggacatctccttcattccagaaaacgtcctcccccaaacctcttcctcccccgagaacctgcctcaagggtttcttcccctacttcctccttcactcccccgactccatggtctctccaccctcccggtgggtttttttttccacctggtgaatcttctctgcaatcatttccttggaatctgactgtccccccaccacacacacctccatttcctttccccatctcaggactcttttccttccttgagttttttgtctccatgcatgtatagctttccatgggtactcttgactcagtttccctcctcctttatccgaggtggtaatatttcccagctcagacagccaggcgcaccctccggagctgctgttctcagcctcactgcccgccctgggcttcagcacctattcagtagcccaggtgcctcgctggaagccccaggcccgcgcaccacagcccatccccagaagatcctggtcccctgctttaaccatcgaaaatgaggtgagaccccatttcaatcccctttcctgctcctgtgacaaatttgaagtgtcatggtgagctgtgtggactctgggtcagcaggtccctaggcttatgacctcctgtcacaactcccctcattgtgtgtccttgagcaagtgacctttgtctgagcctcagtgtcctttcctgggactgttatgaggacccagtgtgatcatgggtgacacttgacagacatgtcagagttggtggcaggtggtggttcgcaattttggcagggacgtttcagggaaggtgttcccgataaaggtgacatttaagatatgacctgagggagggagccgtgtggctatttgaaggaagagagatccaggtggggagagaataacaggcataaaagccttcgagcaggagagtgtgcagaattccaggagccacaaggagctcagtgtggctgaagcagggtgaacgggtgacaggtcagaccttgagggccttgaggaccaacaggaagactttggcttttgccagtcattgttgctcatgtgtctactcctagctctttgggaggctgaagcgggaggatcacttgagcccaggagttgtcccagctaattgggaggcccagatgggaggtttgtttgagctggggagttcgaggttgcagtgagtaatgattgtcccactgtactccatcctggcaacagagtgaaaccctgtctgaaaagaataataataaaataggccaggcatcgtggattatacctgtaattctagcaccacgggaggctgaggtgggtggatctactgagctcaggagtttgagaccagcttgggcaacatggtgaaacccagtctctacaaaaaattagctgggggtggtggtacacgtctgtaatcccagctacttgggggctgaggaaggaggattgcttgagcccaggtggcagaggttgcagtgagccgagatcatgccactgcactccagcctgggtgacaaagtgagaccctgtctcaataaaataaaataaaagaagttctgcagtaggactgttcatgttaggaagaaaacatctttttcatatttttattaaaataaaataaaagaagttaaaacgttcccacaggcccctaaaagtcttgtgagttctggcattgtggttcacacatcagatgcccaagttggccctggtccgcagcagaggagggctttgatgggacttagggtatcacaggtgtgctctggctgttgtggggaacagactgtaggcagccagtgtggaagtgcagggacctggaaggggttgactgcactggccctggaaggccctggtaagaggtggtgaggttgaaaataaggttgggggggccgggcgcggtggctcacacctgtaatcccagcactttgggaggccgaggcaggcagatcacgaggtcaggagatggagaccatcctggctaacacggtgaaaccctgactctacaaaaatacaaaaaatttagccaggcgtggtggcgagcatctgtagtcccagttactcgggaggctgaggcaggagaatggcgtgaacccggaaggcggagcttgcagtgacctgagatggcgccactgcattccagcctgggcaacagagtgagactccgtctcaaaaaaaaaaaaaagaaaaaaaaagaaaaaaagaaaaggctggggtgggcacgttggctcatgcctgtaatcccaggactttgggaggctgaggctggcaggtcacctgaggtcaggagtttgagaccagcctggccaacacagtgaaacctcgtctgtaccaaaaatacaaaaattaactgggcgtggtggtacacacttgtagtcctagctactcgggagggagaggcaggagaatcacttgaacccaggaggtggaggttgcagtgagccgagatcatgccactgcactccagcctgggggacagagcaagactctgtctcaaaagcaaacaaaaaaaaaatcaggttgaatggctgggtgtggtggactgcttgagcccaggagttggacactagccccaggcaacatagtgggacccccatctctagaaaacaaatttaaatttttttttttttaatttagtagagatggagtttcactatgttggccaggctggtatcaaactcctcacctcaggttatccacccaacttggtctcccaaagttctgggattacaggtgtgagccaccacgctcggccctaaaaaaattttaaattgagaaaaaaaggggccaggcgtgttggctcatgcctgtaatcccagcactttgggaggctgaggggggggtggatcatgaggtcaggagttcgagaccagcatggccaatattgtgaaaccctgtctctaataaaaatacaaaaattagccaggtgtggtggcatgtgcctgtagtcccagctattcaggaggctgagtcaggagaattgcttgaacccgggaggcggaggttgcagtgagccaagatcacgccactttctgcactccagcctgggcgatagagcgagactcagtctcaaaaaaaaaaaaaaaacaaaaaacccaggccaggtgcagtggctcacgcctgtaatcccagccctttgggaggccaaggcgggtggattacctgaggtcaggagttggagaccagcctgaccaacatggcgaaaccccgtctctactaaaaatacaaaaattagccaggcatggtggcatgtgcctgtaatcccagctacccaggaggctgaggcaggagaattgctggaacccaggggcagaggctgtagtgagcagagattgcgcccctgcactccagcctgggcgacacagcaagtttctgtctcaaaaaaaaaaaataaaaatccggctgggcacagtggcttatgtctgtaatcctagtactttgggaggccaaggtgagcagatcacttgagttcaggggtttgagaccagcctggccaacatggtgaaaccctgtctctactaaaaatatgaaaattagccaggcggggtggtgggcacctgtaatcccagctacttggatagctgaggcacgagaatcacttgaacccgggaggtggggggtgcagtgagccaagattgcaccactgtactctagcctgggctacagagtgagactcagtctcaaaaaaaaaaaaagaaaaaagaaaaattaaaaaaagaaaacacacacacatacacacacaaacccatctgtggacccttttctgcccagcacatccgggcaacgtttgatcctgacacagggctgttgatggagattatgaacatgaatcagcaactcctgctgcctgttcgccagaccttcttctggtaagggaagatcaccaggcctgagggtggggtggtggtgctcggcatggagctagggccccttacctgactctcacctgccccaactccaggtacaacgccagtataggtgacaacgaaagtgaccaggcctcaggtgcctacatcttcagacccaaccaacagaaaccgctgcctgtgagccgctgggctcagatccacctggtgaaggtcagggactaggaatgatgagtgggcagttgggaatggggaagttatggagcccaagagggtggtgggccatgtgtagagtgagggtaggggaggatttacttttccttcagatcagtgggctaagacccacagatcagcgggggaaatatttgagggtccttccatagaattgatattcatagctggtcgtatgagagtctccccataggacacatcatacaaagccattcacatctgctgtggacgtttacatacttagttttggaaattgggggtggggcattcccacttggcccatgaatcaggagagccaaatatcactgcttgaagaattcaccaaagtctgtagtaagaggagcttctatctggagtgaatatttgagagtccacccttggattgattgggtttgggtgagtctcagggtgaatgcctatgggtgcatctggctaggaacagtggtttcccagggcctctcattgatgtttgactttcatagatgacaaaactcacatttgtccacattcaagagcctcgcgtttcatgtgagtccctttgagatgaatgtctgcatatctgtatatagttttgcctgttctaacagagttacccaaattaactgtgactagaataagatagaagattattttcttctaacaaaaagtctggctgttagtccagagaaagtggggtggttccataatcacccaggacctcctcttctatcttgttgctctgccttccccaatattcagtttccacctcatggtccaagatagctgctgaagctccagccgccacatttgtgtttgagtcagtagcagagggacaggggcaaggaacattgttgacaccacttggatcactttctatggggcaaactggtcactcagctactgatagcctcagggaagactggacaatatagtctttatcccaggtagccatgtgccaagctagaatcctattctatggggcaatggtgaacaggaggcgtttatgccacgctcaagagtgatgtggtaagccagatgcagtggctcatgcctgtaatcacagcactttgggagactgaagcaggaggatcgctgagcataggagttcaagaccaggtgggagcatttgctgattaggtgcctacatagtgatgccctgtctcaaaaaaaaaaaaaaaaaaagaggccgggtgcagtggctcacgcctgtaatcccagcactttgcgaggcagaggcaggcagatcatctgaggtcaggagttcaagacaagtctggccaacatggatagaaaccccgtctctactaaaaatacaaaaattagccaggggtggtggcaggtacctgcaatccctctactcgggaggctgaggcaggagaattgcttgaacccaggaggcggaggttgcagtgaggcaagattgtgccactgcactccatcctgggcaacaagagcaaaactctgtctcaaaaaaaaaaaaagaaaaaagaattatgtgggccaggcgcggtggctcacgcctgtaatcccagcactttgggaggccgaggcgggctgatcacgaggtcaggagatcgagaccatccttgctaacacggtgaaaccccatctctactaaaaatacaaaaaattagccgggtgtggtggcgggtgcctgtagtcccagctactcgggaggctgaggcaggagaatggtgtgaacccgggaggcggagcttgcagtgagccgagatcgcgccactgcactcccgcctgggcaaaagagcgagactccgtctcaaaaaaaaaaaaaaaaaaagaattatgtggcggtgactgaaggttgaccttgatgtaggccttaatggggtttatggccagggttgggggacatttgtaggactcacctctgctcaggtacagactgacatccacctcacccgtgtgcccgcagacacccttggtgcaggaggtgcaccagaacttctcagcttggtgttcccaggtggttcgcctgtacccaggacagcggcacctggagctagagtggtcggtggggccgatacctgtggggtgagtggcacaggctgggagaggggtgtggaagcaagggcagaggggtttatccaaggctcacaaccttgccatcccattgggtacagcgacacctgggggaaggaggtcatcagccgttttgacacaccgctggagacaaagggacgcttctacacagacagcaatggccgggagatcctggagaggaggtggggggtgactgagagcactgagggggtggtctgtggtgtgttggggcccaggggtggtgagggaaatttgctgattacatgagtgtgggagacagaggacgaagggagagtgaagggcgggggagccaggcagggtgcagtggctcacgcctgtaatcccagcactttgggaagccgaggcgggcagatcacaaggtcaggagatcgagactatcctggctaacatggtgaaaccccgtctctactaaaaatacaaaaaaatcagccgggtgtggtggcgggcacctgtagtcccagctactcgggaggctgaggcaggagaatggcgtgaagccgggaggcggagcttgcagtgagccgagatcgcgccactgcactccagcctgggtgacagagcgagactccatctcaaaaaaaaaaaaaaaaaaaaaagagttggggagccagatcccaagcctgatcagctcacccccaaccccaggcgggattatcgacccacctggaaactgaaccagacggagcccgtggcaggaaactactatccagtcaacacccggatttacatcacggtagctctcccccatcctgcacctccccacctcgatagaaagggaatcaccccttatctgcagcatctcaaagctgcctggggttggggttgactgccctctactttcacccttcaactcccaggatggaaacatgcagctgactgtgctgactgaccgctcccaggggggcagcagcctgagagatggctcgctggagctcatggtgagtgggtcagagccccatccgagccagggtcctcccaacctggacccctgctggaccttgaaggctgtttctggcccagttctctgctttcaggccccactaagctgaggactccgtttctttcttttcttctctttgagacggagttttgctcttgttgtccaagctggagtgcaatagtactatctcagctcactgcaacctctgcctcctgggttcaagtgattgtcctgcctcagccttccgagtagctgggcttacaggcacacaccatcacgcccggctaattttggtatttttagtagagatggggtttcaccatgttggccaggctggtctcgaactccttacctcaggtgatccactcacctcggcctcccaaagtgctgggattacaggcgtgaaccaccgctcccggccaaggactccatttctgtgtgtggcttttcctctccgtttttctccatctcctgcccaggctccctccacgctctggcgtgccatatccaggcccccctgttaggcatttacctccttccggcctggttcccatgcctacttggatcctgcctctgctggggttgccctaccagaccctcaccttcatcctcatccgttcctcccaccctttaatttcttttgacattcccacacgcccttacccagtttctggcccaaggacacccacaaacccacgactctcaccccctcctggccactctccccccaggtgcaccgaaggctgctgaaggacgatggacgcggagtatcggagccactaatggagaacgggtcgggggcgtgggtgcgagggcgccacctggtgctgctggacacagcccaggctgcagccgccggacaccggctcctggcggagcaggaggtcctggcccctcaggtggtgctggccccgggtggcggcgccgcctacaatctcggggctcctccgcgcacgcaggtgaggggcagcggggtaggcagagaggaccggattgaagtctaccagggagccgggtttgggtgcggagtttcctaggctcagcggggatccatttggccataattagccccaaaccctcgggccaaccccatcccctgggcagtccccgcccagtgccagcccagtcccaacccccctggactgtgtagaggcacagccctagctcatgcccctaaaccaccaactcacctccggccccgcccatttcactttagccccgccctctcaccgcccccaggctctgtcctgcctcacccagccccgcggcttcagccccgccgtaactcccaaagtctcaggtcacatcagttctgctccatcgggactcgaaccctaagcttgggaccgacccatctccccattggctcagtcctccctgtcacggccctggccgctcctctcggctgagccttgcccctctccggcgaaaccccgcccctacaacctagccctgcctcctgacctggctcggccccgcccttctccatccaggccccgcccctctccaactcagccccgccctctctcccgcagttctcagggctgcgcagggacctgccgccctcggtgcacctgctcacgctggccagctggggccccgaaatggtgctgctgcgcttggagcaccagtttgccgtaggagaggattccggacgtaacctgagcgcccccgttaccttgaacttgagggtgagaagggcaaaattgagaaggagatcggagagaggcaagagagagggagagaagagaaacctggctttgccccaactcatctgggcccatccccttccccgcaggacctgttctccaccttcaccatcacccgcctgcaggagaccacgctggtggccaaccagctccgcgaggcagcctccaggctcaagtggacaacaaacacaggtggggccctggtcaggggtagggaaggggtggagtcttacctggggccggcaggtgggggcaatgtgtgaggcatgggatgttggccaggacccaaaaaggtcatgagggtatggggcagagtccagacccaggttaggggcttaaaggatctgaaatgggtgcggcaaaccaggaatgggtcttgaggtttgtgggtgctgtttagtcccaagaacaagatttgaaaatccccatccatgtctagttctgggagggtgttcatcacccctggggtcagattgagggtacgaggacagtggccagattgagggtatgaggacattggacctgggggtggtattcggggccggggaagcaggttaagagtctgggattgaggccctggagacagattcggggatatgcagctgtgtctagacccaggggaggaagcatcgtggggtgagtcagaggaagtctgcacctcctcactcctccttccccctgcacctctccaggccccacaccccaccaaactccgtaccagctggacccggccaacatcacgctggaacccatggaaatccgcactttcctggcctcagttcaatggaaggaggtggatggttaggtctgctgggatgggccctccaagcccaagcctcctgctccgggggcagaccagactctgactctcctcttggggctgctgccattaaaacgctactactaagactcaggtcgctctgtg

SEQ ID NO: 626 - DNA, 9796 bp, Homo sapiens
gcctttccagggccggggaaccccaggaggaagctgctgagccatgggcgcctacgcgcgggcttcgggggtctgcgctcgcggctgcctggactcagcaggcccctggaccatgtcccgcgccctgcggccaccgctcccgcctctctgctttttccttttgttgctggcggctgccggtgctcgggccgggggatacgaggtgagtggggcctccgagctgaaacgtacaggaggcagagtgaaacccagaatacagtctagaggtgtgggtgggtctgtcctgtgggtgtctagtgaatggctgatgatatgacagtgtggtctgagtgcgtgctttgtgtcattgcgaggtctggctgtgcgcatctgagtataggactgtgtctgattgtacctgcctccgtgtctccgggatgcttgcctagactttgtctgcacttaactgtgggattggaggggcaggaggtggcagggggtgagcagtgtatgtgtggggggaggtgctggctgagagctgggactctggagtctgcctgaaattccagcctagctcttacacttcctgagtgtgtgacgttgggcaagtcacctatcctctctaagcctcagtgccttcatctggaaactggggataacatcaccccacctcccacggtggccgtctgctgtcggcaaatgctgaacaaacatcagctacttctattattattttcccggagtgtgaatgagagctgccctgtggggttgtgcaaagtggagttgtatctatgagcacaactatgtatgtgtgtgtcctgcctgggagggcctggcctcctctgcacataggcgagatcaggcctctctgagtcactcacctctagatcaagacttactctgcagcccccgacctcgggggttattgacaaggtatgtgtgtttggggtccctgtgcagacatgccccacagtgcagccgaacatgctgaacgtgcacctgctgcctcacacacatgatgacgtgggctggctcaaaaccgtggaccagtacttttatggaagtgagtagaggatggggactggtccctgggatccccatggtccctgtaatccctctgggtcctggacattagggtggggccagtgctaccctaatatccagggtttgggctcctctgtctaggaataacccccttggctctgctgttccctgagagccttatccctgttatccacagtcaagaatgacatccagcacgccggtgtgcagtacatcctggactcggtcatctctgccttgctggcagatcccacccgtcgcttcatttacgtggagattgccttcttctcccgttggtggcaccagcagacaaatgccacacaggaagtcgtgcgagaccttgtgcgccagggtgagcctaccccaaggaagtgaaaagaggaagcccagcccagcttctgcttctgcatctctggtttctgagatttgtcatgccacgtgcaagctgtataacatgcgtgtcgctccgcctgcctggactctccatttggagacctcctatacatcccacaaagccccacctgctgtgcatcctctgggaagcctgccatgcagggggcctctttcccatatctgggaactatggcctgggagcgacccctcttgtccttccgccagaaatgtgtacacaggcaggctttcacattcccagtatcacccaccctactcccactcctggctctgaccgctgaccctgaccttgcctgtcctggcacagggcgcctggagttcgccaatggtggctgggtgatgaacgatgaggcagccacccactacggtgccatcgtggaccagatgacacttgggctgcgctttctggaggacacatttggcaatgatgggcgaccccgtgtggcctggcacattgaccccttcggccactctcgggagcaggcctcgctgtttgcgcaggtgcgacccgggacctctcttgggcccacttcttcactcactctggctcctccctcgcccagtcaaaccccgccctctccctgcaatctcacaaggaccaggcccaggcctaggcctgttgaagccctgccccttgagtgagccgtaaagccagtggcttttgagctctggcctcagccggctatgcccagcccaggctgacccagctccggctggctccgccctctcccctaataggcccctcttggtgttctggccccacccactagctcgggtcctggctcctccctaaaccgggtggcaagtggatgcctaggctgccttaaaaacaggttcattacctgtgctcagaccccatccatcctcaggctgtggaagggggaacctcattcctggagtcaggcctgctctgcgctttgacagtgctggggaggtgaacctgggttctgatgttggacccgccctctccctgctagcccaaggtggtgagttctgaaacttccccaagcttggaaataagctggaggcctctctgtttcagccctacgtgtttttgtttttgttttttgagacagggtcttgctgtcatccaggctggagtgcagtggtgcaatcctaactcactatagcctcaatctcccggattcaagcgattctcctgtctcagcccccctagtagatgagactacaagagcgcaccactacgcctggctaatttttaaattttttgtagacagtctgcccgtgttgtgcaggctggtctcaaaaactcctgggtttaagtgatcctcctgttttggcctcccagaaggctgggatcataggcaagagccaccacatcgacctagcactgctttttaacctgtgctctgacctgcccctcccaagcagaggggagtttggtggtgagagggctgggcactaattcacactgccttttcctccctcatccccagatgggcttcgacggcttcttctttgggcgccttgattatcaagataagtgggtacggatgcagaagctggagatggagcaggtgtggcgggccagcaccagcctgaagcccccgaccgcggacctcttcactggtagggggcttggtgagggcagggccagccatggtgccacacactcagaagggccctgggcttgatatctgctctgttgtcactgtcctggaattcctatagtctgggaacaaaggccctgcatttccttttgcattgggacacaaattctgaagcccatcctgggtgggacatggccggctttgaaaccagggaaggtctgggtgatgggccaccccttgaacttggtgtgacctgcaggtgtgcttcccaatggttacaacccgccaaggaatctgtgctgggatgtgctgtgtgtcgatcagccgctggtggaggaccctcgcagccccgagtacaacgccaaggagctggtcgattacttcctaaatgtggccactgcccaggtaaccctggtgtccagaaccttcgagtccggtatatacaatacaatgagctctttccatggtacaggcatcccctaacacgttctccttatttttaatttttttgagacagtcttactctgtcacccaggctggagtgcagtggtgcgatctcggctcactgcaacctctgcctcctgggttcaaacaagcacatccagctaatttttgtatttttgcactggggtctcatcatgttgtccaggctggtctcaaactcctgagctcaagtgatctgcttgcctcggcctcccaaagtgccgggattacaggcatgagccaccgcacctggcctctatttttaacatttttatttatttattattatttttttttttttgagacagagtcttgctctgtcacccaggctggagtgcagtggcatgatctcagctcactgcaacctccgcctcccgggttcaagcgattctcctgcctcagcctcctaagaagctgggattagaggcacctgccaccacacccagctaatttttgtatttttagtagacagggtttcgtcatgttgaccaggctggtcttgacctcaggtgatctgcccgcctcaacctcccaaagtgctgggattacaggtgtgggccactgtgcctagtctatttttaacatttttattgagaattccttttttattttttttagactcactctgtcgcccaggctggagtgcagtggcacgatctcggctcactgcaacctccacctactgggtccaagcgattcttctgcctcagcctcccgagtagctgggattacaggtgcccaccaccatgctcggctaagttttatgtctttttagtagaaagggggtttcaccatattggccaggctggtctcgaactcctaaccttttgacccacagccttggcctctcaaagtgctgggattacaggcgtgagccaccgcgtccagcctttaacatttttataattaaaaaacattattttttcacagagataaggtctcaccatgtggcccaggctggtctcaaactcctgaactcaagtgatcctcctgccttggcctcccaaagtgctaggatataggtgtgagccaccatgcctggcataacacgttctccttaaaaaaatttttttttcctttctttaaaaattgatggctgggcatggtggctcacgcctataatcccagcattttgagaggccgagatgggcagatcatctgaagtcaggagttcaagaccagcatagccaaaatgacgaaaccctgtctctactaaaaatacaaaaattagtcgggtgtggtggcgcacgcctgtaatcccagctacttgggaggctaaggcaagagagtcgcttgaacctggcaggtggaggttgcagtgagccgagatcacgtcacttcactctagcttgggcagcagagtgaaactctgtctcaaaaaaaaaattgttttagattaattttttttttttttcttgagacagggtcttgctgtgtggcccaggttggtcttaaactcctagactcaagcgatcctcctgcctcagtctcctgagtagctgggattacaggtgtgagcccctgtaatcatgttctcatgccccctggaggaagatgctattctattcaccatcacaatgtccccctcctggatttatgtgcattcctcattagaagagatagcataggctgggcaagagatagcatggcatggtgactggatgccctcttctaggtagtgggtccaagagaactgctcaacaactggtggctacttttatctgtgtccccacgctcccaagtgccatacccccacccatgcctgtgcacccaacatccttgaccccatatacatcaaaacacagctatacacagggatggcccaggatcctctggcttcaggactcccctcttgcctgcagggccggtattaccgcaccaaccacactgtgatgaccatgggctcggacttccaatatgagaatgccaacatgtggttcaagaaccttgacaagctcatccggctggtaaatgcgcaggtcagtgcgcctaccctgtggtacccttgtgcacatgtgcgcttgcatccgggggccttgggttatgtgcatagctctcagtgctgtctttgttttctattgttctattgtggtcattctataacaaatgaccacacacttagcagctcaaaacaacagaaatacattgtcttacagttctgtaggtaagaagtccagcatgaggccgggcgcaatggctcatgcctgtaatcccagcatgttgggaggctgagccgggcagatcacgaggtcaggaattcgagaccagcctgaccaacatggtgaaacgctgtctctactaaaaatacagaaattagctgggtgtgatggtgcgtgcctgtaatcccagctactcgggagcctgaggcaggggaatctcttgaatccgggaggcggaggttgcagtgagcggagattgtaccactgcactccagcctgggccacagagaaagactctgtctcaaaaaaaaaaaaaaaaaaaaaaaatccagcctgagtctcaccaggctataatcaaggtgttggcaaggctgtgttccttctgcagtctctaggagagaatataatttccttgctttttccaacatctagaagttacccacattcaaaatctattcttggctccatcttcaaagccagccacatagcatctttctgaccctgtttctgtaatcacatccctttctctcattctcacctcttctgcctctctcttccacattttatttatttacttagagacggagtctcgctctgtcgcccaggctggagtgcagtggcgtgctctcggctcactgcaacctccgcctcctgggttcaagtgattcttctgtctcagcctcccaagtagctgggactacagtcgcgtgccaccacgcccagctaatttttgtatttttagtagacagggtttcaccatgttggccaggatggtctcgatttcttgacctcgtgatccaccccgctcggcctcccaaggtgctgggattacagatgtgagccactgtgtggcctaatttccctactttaagtttggctgatgaacaacctcaattccatctgcaaccttaattccccttttgccatgtaatctaatgtggtaataggttctggggatcaggacatggacacttttgggcagttatcattttacccaacacagatgtgttagtgttttgcactaagtggcctgtggctgtggctgtgtgcacagtcagtcactctcatcagcacagaaacttgtctcccctctcccatctcagacaccccttcccatcaatcttgtcctcactacggtgcaatctccattcccaccttccactcgctcccagcactgctatttcaccaaaacagctcttttatgtcatttatttttatttattttttctttttaaaattttatttatttatttatttattgagacaagagtcttgctttgtcacccaggctggagtgcagtggcatgatcttgcctcatggcaacctctgcctcctgggttctagtgattctcctgcctcagcctcccaagtagctgggactacaggcatgtgccaccaaccctggctaatttttgtatttttagtagaggcagggtttcactatgttggccaggctggtctcaaaactcctgacctcaggtgatccgtccgccttggcctcccaaagtgttgggattgtaatctgaggtgggcggatcacttgaagacaggagttggagaccagcctggccaacatggtgaaaccttgtctctactaaaaatactacaaattaggtgggcgtgatggcactcatctgtaagaccagctactcggcaggctgaggcaggagaatcgctggaacctgggaggcggagtttgcagccagctgagatcgtgccactgcactccagcttgggcgacagagtcagactcagtctcaaaaaaaaaaaaaaaaaaaaaagtttattgagcacctactgtgtacattgggggacacagctcgtgcaaaacaaacatccttttcctcacataggtcactttcttgttcctccaccttgctcaggtgaaagtgcacctccattcattataaaaattgtgtctaggccgggcacggtggctcatgcctgtaatcccagcactttgggaggctgaggcgggcggatcatgaggtcaggagatcgagaccatcctggctaacacggtgaaactccgtctctactaaaaaatgcaaaaaattagccgggtgtggtggcgggcacctgtagtcccaggtactcatgaggctgaggctggagaatggcgtgaacccaagaggtggagcttgcagtgagctgagattgagccactgcactacagcctgggcaacaaagtaagactccgtcccaaaaaaaaaaagttgtgttttttggtaacaatctgacagtcctgcaaaacgattattcctgccctataatgtcacacttagtttttccacaaaagtttttaataataaagttggaattattgtaaaagtttagtaaaatttcaggtttattcttgcatctctgaaatccttttaaaaaaggctagtggtcatgtttgacttcagccaaaattcattttcacacccaaccattggcttgcacgccaaatatgtatttagagaaactgaacctatgggatgcatgaatgtgcacacatgtgtggaagtgtgggcccccaggaaggtgcggactcccgagggctcactccgtcgcctcccccagcagcaggcaaaaggaagcagtgtccatgttctctactccacccccgcttgttacctctgggagctgaacaaggccaacctcacctggtatttggggaaactggggagcttgggggggttggcatgccccgtgggtcatgaccctgccctcaatgcccctgccgctgtaggtcagtgaaacatgacgacttcttcccttacgcggatggcccccaccagttctggaccggttacttttccagtcggccggccctcaaacgctacgagcgcctcagctacaacttcctgcaggtgggtaggagccgggctagagggggcatgcagccccgaggcccgacaggctgggcgccccaacatacccctctgcctccaggtgtgcaaccagctggaggcgctggtgggcctggcggccaacgtgggaccctatggctccggagacagtgcacccctcagtaagtgtcgggcccaagaggggaagaggtttgcggctgaagttggaaaccacccctaggccgcccccctcgagtttcttctttttttttttttttttttttttttttgagacggagtctcgatttgtctcccaggctggagtgcagtggtgcgatctcggctcactgcaagctccacctcccgtgttcacgccattctcctgactcagcctcccgagtagctgggactacaggcgcccaccaccacgcccggctaattttttgtatttttagtagagacggggtttcaccatgttagccaggatggtctcgatctgacctcgtgatccgcccgcctcggtctctcaaagtgctgggattacaggcgtgagccaccgcccccagccgtcctcgagttccttcttaaagcctctaagaatcctgcccgccagcaccggacctttcgcttccccttggggtctcagctgagtcccacagaacctcaccggactcattgtctatgagcagatgaggcgatggctgtgctccagcatcacgacgccgtcagcggcacctcccgccagcacgtggccaacgactacgcgcgccagcttgcggcaggctgggggccttgcgaggtgcgcggggcgagacttgggagacacgggggtggagacaggaaggggcggggccagggcctgggaaaggggacagagacaggtgtgaggcgtagccgagagccctgtggcggggctacaagggctcgtgggggcggggcttgtaggaggcggggaaagatacaggaacggggcggggctttggaggggggaaggaggcggggcgtgggcaagaggaggcggagacagctatggggtatagtcaagggcagcagggtggggctagaaggggttttggggcgactcttgagggaggcgggacagagaccggaacggggcggggcctgaggagaggggaggagtcaggcctggcgtcctgaacccaccggtccctttgcgctcttccgcaggttcttctgagcaacgcgctggcgcggctcagaggcttcaaagatcacttcaccttttgccaacagctaaacatcagcatctgcccgctcagccagacggcggcgcgc

SEQ ID NO: 627 - DNA, 3844 bp, Homo sapiens
tcatgcctgtaatcccagcattttgggaggccgaggcgggcagatcacaaggtcaggagatcaagaccatcctggctaacacggtgaaaccctgtctctatcttagtaatactttattaattagtctgggcgtgtggcgggcgcctgtagtcccagctacttgggaggctgaggcaggagactggcgtgaacccgggaggtggagcttgtagtgagccgaaatcacaccactacactccagcctgggcgacagagcaagactccgtctcaaaaaaaaaaaaaaaaaaaaaaaagctctctgattttagctgttaggtgggagatgggttggaggataccaaagccagcttgcaggctatggggataaagaaaacacctggatttcggacctactttataggtagaggttggcagacatgctgagaaggatggatgtggggtgtgagaaaaggggagacagcaagctgcgctcctcatttttaatttttatttatctatttttgagacggagtttcgctctgttgcccaggctggagtgcagtggcaccatctcagctcactgcaacctccacctcccgggttcaagtgattctcctgcctcagcctcctgagtagctgggattatgggtgtgcgccaccacacccggctaatttttgtattttttagtagagacggggtttcgccatgttgtccaggctggtctctaactcctaacctcaggtgatctgccctccttggcatcccaaagtgctgggattacaggtgtgagccaccgcgcccagccccaatccctatttttcagtctagtggatgagtggagggtggggccgtttgctgagatgcagaaagatcagggataggtggagagggagctgagggggcaactttgaggtccaagcgaggatgtcaaggaggatgtctgtctcctccaacaaggtaggctcattccagcctcacggcttttgctgttctgtcttcccatgtgcagaaatggcctctctgcatcttcacatacggggattttctcagccttctggctttggctcaaatctcacctccttggcgtccttcacccatccctccaactaaaatcccgaactcctccacctaaagactcaaattatcctgtttaaatcctgattgcgctgggcgcggtggctcacacctgtaatcccagcactttgggaggccgaggcaggcagatcacctgaggtcaggagttcgagactagcctgaccaacatagtgaaaccccatctctactaaaaatacaagaattagccgggcgtgatggctcatgcctgtaatcccagctactcgggaggctgaggcaggagaattgcttgaaactgggaggcagaggttgcgatgagtggagatcgcgccattgcactccagcctgggcaacaagagcgaaactctgtctccaaaaaaaacaaaaaacaaaaaaggcctgatagcactcaccactattgttaactttctatcttcccaatcagattgtgggctccagtagggcagggtccacatcttggtcttgttcaccactaaatccttagtgcctagcacggagcccaccatagagaatagactacatgaattgtagagtgagtgaataatcctgttggccgtatgcactgttaggagggtgtgtttgagatacagatgacacccagggtctcacattcttgcaggagggaaagagacgtcagccctgggtcccagaagaggccactgacccagtgggagttcagggaaggcttcccagaggaggtggaggtgacagctgcagctataagggaaggaagaacagagcgttatgcagcatgtgaaggctttggagacttgtgagggcacgaaccgggctcactatcccattagacaaaagtggctgaggaaggatgaaactgtgtctaactctgcctggtgaccgaaatcttgtccatgggtgacgcttaagaagtgaccctcggccgggcgcagtggctcacgcctgtaatcctggcactttgggaggccaaggcgggcgggtcacgagttcaggagatcgagaccatcctggctaacacggtgaaaccccatctctactaaaaacagaaaaaattagccgggtgtggtggcgggcacctgtagtcccagttactcgggaggctgaggcaggagaatggcatgaacctgggaggcagagcttgcagtgagccgagattgcgccactgcactccagcctgggcgacagagcgagactctgtctcaaaaaaaaaaaaaaaaaaaaaagtgaccctcataaaaaaattagctgggcacgatggtgcacactagtcggaatgctggggtgggaggatgacctgagtccgggagtcagaggttgcagtgggccgagatcgcgtcacagcactccagcctggcgacagagtgagaccctatcaaaaaatagcagcaggccaggcgcggtggctcatgcctgtaatcccagcactttgggaggctgaggcgggcggatcacgaggtcaggagatcgagactaccctggctaacacggtgaaaccccgtctctactaaaaatacaaaatattagccgggcgtggtggccggcgcctgtagtcccagttactggggaggctgaggcagaagaatggcgtgaacctgggaggcggaggttgcagtgagccgagatcgtgccactgcactccagcctgggagacagcgcaagactctagctcaaacaaacaaacaaacaaaacagcaacaacaacaacaaaaccatcctcccctcccgaggggacagaacagaaacgaatgggcgagtgccgggccaagcagtgggtctccagcaggtggcattaaaataggaattttggctggggacggtggctcacacctgtaatctcagcactttggaaagcccaggcgggcggtcacctgagggcagaaccagcctcgccaacatggtgaaatgccatctctactaaaaataaaaaattagccaggcctggtggtgggtgtctgtaatcccagcaactcgggaggctgaggcaggagaatcgcttgaaccaggggggcagaggttgcaatgagtcaagattgcaccaccgcactccagcctgcgtaacaagagcgtgtaactcttgtctcaaaaataaattaaataaataaataataaaaataaaaaagaatcttcattcatgggaagtcgagaacacatgaaaacaagtaaaggccgaagcgcagtggctcacgcctgtaatcccagcactttgggaggctgaggcgggcggataacctgaggtcggaagttcgagaccagcctgaccaacagggagaaaccccgcctctactaaaaatacaaaattagccgggcatggcggtgcatgccagtagtcccagctactcgggaggctgaggcaggagaatcgcttgaacccggaatgtggaggttgtggtgagctgagatcgggcaattgcactccagcctgggcaacaagagcgaaaccctgtatcaaaaaaaaaaaaaagaaaaaaaaaggaagaaaaggcctaaaggcgccgggcgcggtgggtcacgcctgtaatcccagcactttgggaggccgaggcgggcgaatcacgaggtcaggagatcgagaccaggtgaaaccccgtctctactaaaaatacaaaaaaattagccgggcgtggtggtgggcgcctgtagtcccagctactcgggaggctgaggcaggagaacagcgtgaacccggaaagcggagctggcagtgagctgagatcgcgccactgcactccagcctgggtgacagagcgagactccgtctcaaaaaaaaaaaaaaaaaaaaaaagaaagaaaggg

SEQ ID NO: 628 - DNA, 2128 bp, Homo sapiens
tctacctccgggctgaaacgtcaccatgcctccccacagacagacggatggacagatgggcctccctgcacctgctctgtgggtgtgggggctcctgctcagcagcagtttccagacccttctccctgctttccccaagccacccgccttgaatctggggtgctctaccagacccatcccctcatttctaaagatttgagccactagtcgtgtccctctccctcagaaatgccttggtgacacttggctgctttcaactcttccacccatctgcctcttggtctcatctttaccttctgctaaaggtcctgacccccacccccgccacgccatggggcaccccatggtggtgcgtccttgggagcagctctgtccctttccccgtggcctttgccccgcctcctatgacttcgattcccacctgtccccgacccctgggaccactgaccgggcccgatcaccctgtcactgccctgtcatctgcttaccccacacggtgctctgctgacccaggtcttgctgtctcccaacagccccacgaggcttcccgtcgctcctggacactgcaggctgagcccgctgccccgccgcctccatgaggaaggcttttcctctgtgagccccaggccaccctttccctcctttaagtaattacttaagtcccttgccagggccctcccagtaccctttctaaagacacccctgccccagcatgctgcaggctcctgctccactttcctctcaggccctcgtcgctgtggtgctgcctttgttttctgtctctgccacggcagggggtcagctccttggaggtggggcttctgcccttgctgtaccactgcctggcacacagtaggtgctcaataaagacttgcagggtgagctgcctgaagaatagtcaccagaggccagaaatgtctagagctctgccggtagggtgactggccgaggagcctggcctgcatgtgtgcgtgtgtgtgtgtgtgtgtgtgtgtgtgagtcagggtttatatgcaggtgtctacaggagacatgctgggttctgtgctgggtgtgaggaatatgggagcagaaccccagggaggtggcagagacttgggggccaaagggctggggtgcaggggggcaacagccaggtgccactggccaccccagccgcagggagccctgcccaccctccaggtgcctggatgtccaacctcactgctattcccacctcaagccaggcctggagatggaggccccatgactcagccagggccggtttgcagctgcggctgacccagacgggcgggcagcccccagcccccgggcctgcacccaggacagggccgccctccctccctcccccgcttctggctcctaggacaggattctctgaattcagctcccctgaggctggggccaggttggaggccaggcctgggggctctgggctggggtcccagataggggctgggcggccaggcttggaatctggaatccagccccattcctggcatctgcaggagcctcgtggggagggagacttgggatggacttcaaccagccagggctggattcttgccccggaacctgcattcctggggcagccaagggatccttcccacttctgggcccagcttggccctgcctggcattcgaggcccatctggggcttgggggtgtctccccaactctcagacataaggacacccttccaagcttgttccttcacctggcggggccctgagccccacacccctcccctgtcctttctccatccgacatcaagcgcctccctgcctctgctcgcacagtctctgagatggggaactcagcacctcacaggtgggcccagctctggtgctgtctgtgttgggggagctggggcagcccccaaaagaccttggagacagaccctcagaggcaggagcagaggctggcagtggatgctgtgcctggaggccttgagggcgaggtgtgatgatgaggcccaggctgcagggctctttctggctctccagctccggagaacaagggatttcctcctgctctgcccaccctccccagccagtgcatgctcagcctcagcaccgcacctgggcgccctccatgatctgccccacctggacacatggctcgaggg

SEQ ID NO: 629 - DNA, 2129 bp, Homo sapiens
tctacctccgggctgaaacgtcaccatgcctccccacagacagacggatggacagatgggcctccctgcacctgctctgtgggtgtgggggctcctgctcagcagcagtttccagacccttctccctgctttccccaagccacccgccttgaatctggggtgctctaccagacccatcccctcatttctaaagatttgagccactagtcgtgtccctctccctcagaaatgccttggtgacacttggctgctttcaactcttccacccatctgcctcttggtctcatctttaccttctgctaaaggtcctgacccccacccccgccacgccatggggcaccccatggtggtgcgtccttgggagcagctctgtccctttccccgtggcctttgccccgcctcctatgacttcgattcccacctgtccccgacccctgggaccactgaccggggccgaatcacctgtcactgccctgtcatctgcttaccccacacggtgctctgctgacccaggtcttgctgtctcccaacagccccacgaggcttcccgtcgctcctggacaatgcagggtgagcccgatgccccgccgcctccatgaggaaggcttttcctctgtgagccccaggccaccctttccctcctttaagtaattacttaagtcccttgccagggccctcccagtaccctttctaaagacacccctgccccagcatgctgcaggctcctgctccactttcctctcaggccctcgtcgctgtggtgctgcctttgttttctgtctctgccacggcagggggtcagctccttggaggtggggcttctgcccttgctgtaccactgcctggcacacagtaggtgctcaataaagacttgcagggtgagctgcctgaagaatagtcaccagaggccagaaatgtctagagctctgccggtagggtgactggccgaggagcctggcctgcatgtgtgcgtgtgtgtgtgtgtgtgtgtgtgtgtgtgagtcagggtttatatgcaggtgtctacaggagacatgctgggttctgtgctgggtgtgaggaatatgggagcagaaccccagggaggtggcagacacttgggggccaaagggctggggtgcaggggggcaacagccaggtgccactggccaccccagccgcagggagccctgcccaccttccaggtgcctggatgtccaacctcactgctattcccacctcaagcaaggctggaaaatgaaggcccactaatccgccaggggcgggttggcacttccggttaaccaaaacgggcgggcagccccagccccctggcctgcacccaagagaagggcggcctccctccctcccccgcttctggctcctaggacaggattctctgaattcagctcccctgaggctggggccaggttggaggccaggcctgggggctctgggctggggtcccagataggggctgggcggccaggcttggaatctggaatccagccccattcctggcatctgcaggagcctcgtggggagggagacttgggatggacttcaaccagccagggctggattcttgccccggaacctgcattcctggggcagccaagggatccttcccacttctgggcccagcttggccctgcctggcattcgaagcccatctggggcttgggggtgtctccccaactctcatacataacgacacccttccaagcttgttccttcacctggcggggcccttagccccacacccctcccctgtcctttctccatccgacatcaagcgcctccctgcctctgctcgcacagtctctgagatggggaactcagcacctcacaggtgggcccagctctggtgctgtctgtgttgggggagctggggcagcccccaaaagaccttggagacagaccctcagaggcaggagcagaggctggcagtggatgctgtgcctggaggccttgagggcgaggtgtgatgatgaggcccaggctgcagggctctttctggctctccagctccggagaacaagggatttcctcctgctctgcccaccctccccagccagtgcatgctcagcctcagcaccgcacctgggcgccctccatgatctgccccacctggacacatggctcgaggg

SEQ ID NO: 630 - DNA, 2132 bp, Homo sapiens
tctacctccggcctgaaacgtcaccatgcctccccacagacagacggatggacagatgggcctccctgcacctgctctgtgggtgtgggggctcctgctcagcagcagtttccagacccttctccctgctttccccaagccacccgccttgaatctggggtgctctaccagacccatcccctcatttctaaagatttgagccactagtcgtgtccctctccctcagaaatgccttggtgacacttggctgctttcaactcttccacccatctgcctcttggtctcatctttaccttctgctaaaggtcctgacccccacccccgccacgccacggggcaccccatggtggtgcgtccttgggagcagctctgtccctttccccgtggcctttgccccgcctcctatgacttcgattcccacctgtccccgacccctgggaccactgaccgggcccgatcaccctgtcactgccctgtcatctgcttaccccacacggtgctctgctgacccaggtcttgctgtctcccaacagccccacgaggcttcccgtcgctcctggacactgcaggctgagcccgctgccccgccgcctccatgaggaaggcttttcctctgtgagccccaggccaccctttccctcctttaagtaattacttaagtcccttgccagggccctcccagtaccctttctaaagacacccctgccccagcatgctgcaggctcctgctccactttcctctcaggccctcgtcgctgtggtgctgcctttgttttctgtctctgccacggcagggggtcagctccttggaggtggggcttctgcccttgctgtaccactgcctggcacacagtaggtgctcaataaagacttgcagggtgagctgcctgaagaatagtcaccagaggccagaaatgtctagagctctgccggtagggtgactggccgaggagcctggcctgcatgtgtgcgtgtgtgtgtgtgtgtgtgtgtgtgtgtgtgagtcagggtttatatgcaggtgtctacaggagacatgctgggttctgtgctgggtgtgaggaatatgggagcagaaccccagggaggtggcagagacttgggggccaaagggctggggtgcaggggggcaacagccaggtgccactggccaccccagccgcagggagccctgcccaccctccaggtgcctggatgtccaacctcactgctattcccacctcaagccaggcctggagatggaggccccatgactcagccagggccggtttgcagctgcggctgacccagacgggcgggcagcccccagcccccgggcctgcacccaggacagggccgccctccctccctcccccgcttctggctcctaggacaggattctctgaattcagctcccctgaggctggggccaggttggaggccaggcctgggggccctgggctggggtcccagataggggctgggcggccaggcttggaatctggaatccagccccattcctggcatctgcaggagcctcgtggggagggagacttgggatggacttcaaccagccagggctggattcttgccccggaacctgcattcctggggcagccaagggatccttcccacttctgggcccagcttggccctgcctggcattcgaggcccatctggggcttgggggtgtctccccaactctcagacataaggacacccttccaagcttgttccttcacctggcggggccctgagccccacacccctcccctgtcctttctccatccgacatcaagcgcctccctgcctctgctcgcacagtctctgagatggggaactcagcacctcacaggtgggcccagctctggtgctgtctgtgttgggggagctggggcagcccccaaaagaccttggagacagaccctcagaggcaggagcagaggctggcagtggatgctgtgcctggaggccttgagggcgaggtgtgatgatgaggcccaggctgcagggctctttctggctctccagctccggagaacaagggatttcctcctgctctgcccaccctccccagccagtgcatgctcagcctcagcaccgcacctgggcgccctccatgatctgccccacctggacacatggctcgaggg

SEQ ID NO: 631 - DNA, 2649 bp, Homo sapiens
cttgtaggtactcattgaggtttattgtgtaagatgaatgaatgttgcaaattcctaaacatgtgattcagatgcccaatcttactctgttactttatgaaaattttttaaagctatatgatgttatatcaaaatatgttgttatactttaggataatcggtgtgttagccctgaatttcagcataagtcccatttttttccatgggagtctaggaaagctatatgtttattcagcagcaaaatacagtttggaacttaaataaactattgatcaatttctggtcttatgctagaaggaataaagcatcaagaaaaagaaaagatttgctgtcaagaccaggaaaatttgacaatagagtattagaatgcaggaaatgaggggaagtggaaaggcagcaagtaggagagaaaaagtgcagggacagtagaaagtgaatgtaggagctttctgacccatgcacttcaggaacgcaattcatccctaaaatgctgtttgctgtcttaggttgcaagtaaccaaattaaaaccagtttgaaagtagagtgagacagctgtcatcataagagtcatttgatctgtttaaaggtggctgcttgtatgcagggaccaacagtcatgttcagggcagcagctggtgcacacttcaagcacagaccataagagctaccccaggcagcacctgctaccaatagtgcaaacaactcagagagacctcgttggcataagggaatactctatcctttctgagtaaagagcaagtagaactaaaggtttcacattttaaacatactttacattcctcctcttctggggctcaagcctacttttgggccaaagcggatgttatatctgacatagagtcctcggagcagcagttgttcctgaaagttcctttttgcatctttgtgcctcatgcagtggcttacaagtcaaccagacttctcccctgacttttgatgtgtaagagcttgtgtttcaaatgggtttggttttcttaatgtcaccctaggttggtggaaaggagagtaaatggaaatggggggagcagggtcccctggggaggtttaaacagatggaagtcaattgtctcttgagaatagaggaggctattgagttttcattccacactctgctcctgttctgtcagcaaagaacaagcactactctccagcaattgctttccactggactcccccacctcggcctccctacaaaaacctagggatcaacttagttcactccaaattagaaaatttaatagtcatttgtttcttcttgtccacagggagaaccattttctttccttctttcaaaattgcccaggtcttgtgaagggttattaacaccggaaagaaatacattttaataagcttaaatctcatttctacatgaaaccatcagattttagtactgtgatattttggtccctctgtcttttaggctctgacaccaaaattgccataatgaaggtgtttcacttcttctcatttatttttatgggatcttttattcccaaatgccttttcatcccagccaaagggagaaatgttgatagatctgccatcaagaaggttccaaagctggcctgtcaggttttctgttttcttgtttattatctttgaacttttgttttaaatgttttaaacacttatttaccatgtaactaaatgtctgatagtattgaaaatactttgtgggttttaatttatttaatgctcatgaaaccctatgaggtaggtactgatattatttttattttactgatgaggaaagtgaagcaaagagaagtgaaatgaaaggtagtgagtgatgggaccagggtttggacatgggcagtctggctctaaaatgtatgcttttaactactatgtaatgctgcctcacaaacaacttgtctcacaaattgatattctggatcagaggatgtcgactggcccgcaaatgtattttgtatggctcatacacagttcagaagttttaaaaatttacatagaaatctgcatttcctgacttcttttgaaaatgggaataccaaacatcattaggcttgaattcccaatacggcaacaacagctgagcaacaagcagctgtttagactaggcactcgctctccaatttccacagtccccaccaatgcagatcatagtatcgacttaaatttcctgcctgccttagagaagcttctgagcttgtgacctctattctagctgctctatgaatggacgctgccccagtacagcgaggacctgctgcaaaatgcatttcttagtcttcaatacttattcctccttgtaactggatttctggtaagttatgtctcatggtggatctgccccaaagatggagactgaatggcagtgagtcactcgccctggcctccattgttctggagaaggttccagccacatggttgatgtcagctggttttccagagccagagctgggttgcgggacagacacacctgcatctaatagtgaaaggcaaagttgaaaggccaagaccagcctgaggtctgagggaccaagggcttcacagaggccagaagttcagaggtggacataaaaggtgttaggagaataaggaagtgaaaagaacatagtacagtgtatcagaggaggagctccaggctggcaaatatcactccc

SEQ ID NO: 632 - DNA, 2649 bp, Homo sapiens; identical to SEQ ID NO: 631

SEQ ID NO: 633 - DNA, 190 bp, Homo sapiens
atgagaaagtaaacatacaacacagtaaaagttgttccaagtatttaaaaatgttctatatcttctaccttattatggctcaagatatagtaacttttgtggggttttatcattgtttttgttttattttgtgaaaacatccaagagcccgcaacagcctatagatttgcagatccttttctttcctggg

SEQ ID NO: 634 - DNA, 190 bp, Homo sapiens; identical to SEQ ID NO: 633

SEQ ID NO: 635 - DNA, 1821 bp, Homo sapiens
cctcgagcctagtagttcaaggttgcagtgagctaggatcgggccactgcactccatcctgggtgacagagtgtgaccctgtctcaaaaacaaacaaaaaacacctttggagaaactgcagctctgtggacacccataatcccaagcagcatgcttggcagtgccctcctcccactgcttctgtctagaaactacacccacgtgggcactccccctacccctaaaaaaccaggccactccaaggaggaaattgtctcaaccagcatctcacagtgaggaaaaatctgcatcacaaattgcaggccaccatgaagtttctggagtaccactgccagcctcttccaggcttgggtaccccttcatcacctcctccagggagcttttcatgacttccccagaataagtcactatgcccatactgatgttcccagtcctgaacccactccttcagcactggcatccaggggctgtgaattttcacttccctgtctctctcatcagactccactcttctacgagaagggaagaatttgcatttattgtaaaatgctgattaggtgctaatcattcgacacccaccatctctaattctcaccacagttctgtgagccggatgttatcattcccactatacacactcaggtgaaatgacctgttcaaggtcaaatccaggtccatatggctcccaagcctgggcagcctctctatggtctgatggtgtctcgtcggctccataagccccactccctgcccacacccccagcacatcacttagaaaatgcccctgggttacagtgccacggtcagatgcacagatgtgtacacatggggtcacagtcactgacctggaaacaaagccactttgcccatgcacttatttctcagcgccagagaacccagggtgcaggaaggcctcggcacaccaccacctccactgccaaggcaacgagctggggccggcacgtggtgagcaagaaaggcaccaagctctggagctggacggaacaaggctcaaatcccagtggtaccaaccacacgctcccgggcaagtgatttccaatccctaagcctccccatttggtcatcataaagatcccccctgcctctggaggctgctacagtttgtgaaaaggagggtatacacaggctccgaataaacggaggctctcgtcccttctccgccttccctgtcactggctccagggtctgagagagcagcaaccttgtttctctggtctgtaaaatggtctgtttctttctggctccactgcgctatggaaatcgtggggttgcggggaggctgcagcttgtcatccagcccccaggcactgactgcagagatcccacccctgacccccccagactgggatgccaggaggggcagaggatctgcacttctgagctgtgtgccttgagccaagcacttgaccgcctgtgctccaggtcccctagctttgagcaggggctaacggaagaacctgccttgccaggttgttgtagtaaatgagtcaacacacgtttcacacttagcacagtgcccagctcccagtaaatgctcaatagatggaagctatgattagtcatggaacacggcctttctgctgtcctccctgccatggaaaatgggtaactcagctggagggcagttcctctgtgtagactggccaaggccccggggatgaggcagggtacctgggtgccaaaccagccccctctgctaccaatgctcggcaacacaccgacagtcaagacacacaggaggacgtcccatctcccttgtatccaattcggcaccatatcccagtgcctggcacaagacct

SEQ ID NO: 636 - DNA, 1821 bp, Homo sapiens; identical to SEQ ID NO: 635

SEQ ID NO: 637 - DNA, 313 bp, Homo sapiens
tttctttttttttttttttttttttttttttgagacagcgtctcactctgttgcccaggctggagtgcagtggtacaatcacacaactcactgcacctccacctcctgggctcaagcaatccccctgcctcagcctctggagcagctgggactataggcatgagccaccatgcccagttaatttttaaaaattattttttgtagagacggggtttcaccatgctgtccagcaggtctcgaactcccgggctcaagcaattctcccaccttggcctcccaaagtattgagatgacaggtgtgagccaccgcgcc

SEQ ID NO: 638 - DNA, 313 bp, Homo sapiens; identical to SEQ ID NO: 637

SEQ ID NO: 639 - DNA, 1399 bp, Homo sapiens
ccttgagctagcatttcattatgaccgtgatttttccccgcatcactttccagccttgtggtccacaattccactgggccctaagtatgtactgaactttcctgcctccctcattttgctctgcttgtgcaattttttccaccctccatctctgtcaaacataagccttcctgacctctaagacctacctttgtcatgtgcctttaccctcaggcaaggggcaatctcttctattcctcttctaccttcctgtagcttctcccccagggtttatcacattctgccttgaatcctagggaacaacatgtgtagtggaatgaacacaggcctctgaatccaagatgtgagtttaaatcccagctttggaggtggttacttaagttctcagtgccttcattcttcttcctatataaagtagatattacaatatctaacttacagagtcattgggagctatacatgcagtgattgggtaaagcacctggcacatggcaagcaattagcaaatgctggttacttctacttctttctcttctcttttcccagtgtatcataagttccttgagagcaggcaccatgtctgatttacccttgtatttcccacagtacttcccgtagtgagttacccttagtaaatactcagtaagttgaattgaatttaaattacctgtaagtcttaaaatgtgggattaaattaagagtatgttgccctggaaatacccaaatgtctaccgatggatgaatggataaacaaaatgtgatatacacataatggaatattattcagccttaaaaaggaatgaaattctgacatgtgctacagtatgatgaacctggaagacattatatgtgaaataagccagacagaaaaggacaaatactctatgattccacttatatgaagtacctagagtagtgaaattcatagaaatagaaagtacaggttgacatcgcaaatctgaaatgggaaattctccaaaatctgaaactttttgaatgctgacatgatgctcaaagaaaatgctcgttggagcgtttcagattttggatttttggatttgggatgctcaactggcataatgtgaatattccaaattctgaaaaaatctgaagtctaaaacacttctggtctcaagaattttggataaaggatactcaatgtgcaacatgtagaatggtggttacaaggtggtaggagagaatggagagttactgtttaatggtacaatgttcccatttgggaagatgaaaagttttggaggtgtgtgatggttatggttgtgcaacaatgggaaggtacttaatactgcttaactgtgcacacttaaaaatggtaaaaatgataaattttgtgtatgtcttacaacaataaaagaagttttttttttcaaaaaggaaa

SEQ ID NO: 640 - DNA, 1399 bp, Homo sapiens; identical to SEQ ID NO: 639

SEQ ID NO: 641 - DNA, 788 bp, Homo sapiens
ggaaacattgcttctgtaccagccaaccttctgctcctgaagaatatctctgctatgggcctgtactgtggtcaatacaaaaaatgaactttcccgtcttctccaagagcctatcttcagtgcttcggtactgccagcaagggcgcatccaaccatatgtcggaatggttttcaagctggatgaggtcaatgatgccttccttcatgtgatacaggggaaatccgtgggcaaggtgcttctcgctcttaaataaatcctcacctgagcagcaaagttaacatgtccagatcaaaactccacatctttccccaaaacctgatttcccttctgtgtttccaaaggtgttaccactttccttaccaatccaggtttaaaatcttggagtcacctttgattctgtttactaattgcccctaattaatatgattatatagtttattgtccaaacctttttgagagtaaaagggtgccattagtaattacatcaggaaaacatatcccaggcaaaccaggatatatggtcagcctactcgatgcattatgaaatgcagtgattgccaagttctgtcattcccacctctaagatatctcttacctccatatcctcttttccattctgactaattaagcctcaactgctgtcaccagtgaccttctaactgcttttcctacctttaaactaccctcaccccctccattcttgtgatgcattattgccatggtgatcttcccgaagcatagctctgactatggcccatctcagaaaacctacagtggctcaccgttg

SEQ ID NO: 642 - DNA, 788 bp, Homo sapiens; identical to SEQ ID NO: 641

SEQ ID NO: 643 - DNA, 2471 bp, Homo sapiens
gtactgtgttggcttgttttgcagtgagacttattctgagattaagagctgcatttagcttcttggccaccaggatcccagagtaaattacttttcaggactctaaatagtacgcaggagatttgaaagaactgatgcaatttctaaagcagcctgacttcctcccaggaggttactcccacaccaagcctctgacttcatgaccaccagatttagaaattgaagtatctatgtaagaagttgcctcctaggcagaaatcaagaaatccaactataacataggttagagtccattttggtttttatatccttccacagaggaaagaggaggaagaatctggagatgcgtttttggtttttggttttttgtttttttttttttccagaggctcatgtatatcctacatcatggtcagtttcagagcagggctgtgccaccatctcagtgactcctggaatactaaattggatctttgtagaggaagaaaataacacagttctagattttccctagctgttaattagttttatggcataattaaaatagctcaggagtaaaaacaaagtccagccttaacagcctgttaagtcttcttttcttatcttgaaaagaggtaagataatgaagtttaaacagttgaagaagttaaccggaaaggaattaacatttcaaggccttgccgcttcttcctcctcttgtgatatgaaccagaattgagggaaaataggcaggagggaacccacactgaattttccagactctactgctgaaagacattgtatatttttattgtaatcatatgtgatgcaagataatattgctcatatctgaatcccaaaagaaaagaagatgtttgtctgagcatcccatgaggtaagcagccccatggaaggaccagctgcatccagcaaagggctccaggtccctgacgtagttgacggtgatggcagaagtaaatctttgtattcttgcagagactttgtttctgaaagaggccaaaagtcatttcaaactgaatctgacggataagataggggccatagctgagaaaaataagtagcgaagccgatctaaaccaaggtgtaactgtgaaatagtaaccatcttctttgcacgtttcaaaattggccctggacgccatcgcaagaggaaaattccaaagctgtgcagcagcggcagtaccattggaagagtttacagcctaccaggactacttagaaggggatcatgtttatttggatatataacccctgattggtttgttttaaaaataaacgttattatgttagtgtcatacctcatggtttccttggaacattctcctctaatcctctttgagagagtgggagggagagattgtgaggggagagagaagtgttaaacagagatgttcctaaggaggaccaggaatcctaaattacctaaataacccacttggttatctccactccttgatagcactgtgtgaggtatgatgcagtcaggtaaaggacaatttatctttgaagacaaagataaattcgagtccccattttcaagagtcagtgagaagtaacagcttgtttgtgtggcactgattgatccttgtccgggcaagtggtccctccacaggttatccggcttggcacacaacagacagaggtgctggcggactgtggaaccagacccgctgtggttcccctcctcaccctgccacttcctagctgtgcatcttggacaactgattgaatcttgtgcctcatttttctgtagaattgaaacaataccctgacccattgggcaatggagatcaaatggcattgatgcaggtaacatgcttaacacagggcctggtatgtagtgggcattcagtaagtggaagttacgattattattaggtatcaaagaacaaaacttaattgtcagaataagcaaaccagttggaataataaacgtagcctttagagttaaatggcacaaccctgatagccacacataaactgttttggttatttttcgttggatattcccagtctttatttctacatccctcttcaggctgagtgcttaaaatacatttatatgtagtctcaattagattatgctgtttcccccaaaagactacagtgactattattttaatttatagaacctcgaattgcatggaatagctaccacatctccctttaaacctggtagcttccaaaacttcctgatggcgttttcgcaaatgggtccctatgtgtcattgaaggagacagtgtatctaggaaaagaaatgaggatactgagcaaggtgttggtggctcatgcctataattccagcattttgggagactaaggcaggtagctagcttgaggccaggagttcaagaccagcctggccaacacaatgagaccccatctccacaaaaaaaaaaaaaaaaaaccctaaaaattatccaggcataatggtgcatactagtagtcctaactactcaggaggttaaag

SEQ ID NO: 644 - DNA, 2471 bp, Homo sapiens
gtactgtgttggcttgttttgcagtgagacttattctgagattaagagctgcatttagcttcttggccaccaggatcccagagtaaattacttttcaggactctaaatagtacgcaggagatttgaaagaactgatgcaatttctaaagcagcctgacttcctcccaggaggttactcccacaccaagcctctgacttcatgaccaccagatttagaaattgaagtatctatgtaagaagttgcctcctaggcagaaatcaagaaatccaactataacataggttagagtccattttggtttttatatccttccacagaggaaagaggaggaagaatctggagatgcgtttttggtttttggttttttgtttttttttttttccagaggctcatgtatatcctacatcatggtcagtttcagagcagggctgtgccaccatctcagtgactcctggaatactaaattggatctttgtagaggaagaaaataacacagttctagattttccctagctgttaattagttttatggcataattaaaatagctcaggagtaaaaacaaagtccagccttaacagcctgttaagtcttcttttcttatcttgaaaagaggtaagataatgaagtttaaacagttgaagaagttaaccggaaaggaattaacatttcaaggccttgccgcttcttcctcctcttgtgatatgaaccagaattgagggaaaataggcaggagggaacccacactgaattttccagactctactgctgaaagacattgtatatttttattgtaatcatatgtgatgcaagataatattgctcatatctgaatcccaaaagaaaagaagatgtttgtctgagcatcccatgaggtaagcagccccatggaaggaccagctgcatccagcaaagggctccaggtccctgacgtagttgacggtgatggcagaagtaaatctttgtattcttgcagagactttgtttctgaaagaggccaaaagtcatttcaaactgaatctgacggataagataggggccatagctgagaaaaataagtagcgaagccgatctaaaccaaggtgtaactgtgaaatagtaaccatcttctttgcacgtttcaaaattggccctggacgccatcgcaagaggaaaattccaaagctgtgcagcagcggcagtaccattggaagagtttacagcctaccaggactacttagaaggggatcatgtttatttggatatataacccctgattggtttgttttaaaaataaacgttattatgttagtgtcatacctcatggtttccttggaacattctcctctaatcctctttgagagagtgggagggagagattgtgaggggagagagaagtgttaaacagagatgttcctaaggaggaccaggaatcctaaattacctaaataacccacttggttatctccactccttgatagcactgtgtgaggtatgatgcagtcaggtaaaggacaatttatctttgaagacaaagataaattcgagtccccattttcaagagtcagtgagaagtaacagcttgtttgtgtggcactgattgatccttgtccgggcaagtggtccctccacaggttatccggcttggcacacaacagacagaggtgctggcggactgtggaaccagacccgctgtggttcccctcctcaccctgccacttcctagctgtgcatcttggacaactgattgaatcttgtgcctcatttttctgtggaattgaaacaataccctgacccattgggcaatggagatcaaatggcattgatgcaggtaacatgcttaacacagggcctggtatgtagtgggcattcagtaagtggaagttacgattattattaggtatcaaagaacaaaacttaattgtcagaataagcaaaccagttggaataataaacgtagcctttagagttaaatggcacaaccctgatagccacacataaactgttttggttatttttcgttggatattcccagtctttatttctacatccctcttcaggctgagtgcttaaaatacatttatatgtagtctcaattagattatgctgtttcccccaaaagactacagtgactattattttaatttatagaacctcgaattgcatggaatagctaccacatctccctttaaacctggtagcttccaaaacttcctgatggcgttttcgcaaatgggtccctatgtgtcattgaaggagacagtgtatctaggaaaagaaatgaggatactgagcaaggtgttggtggctcatgcctataattccagcattttgggagactaaggcaggtagctagcttgaggccaggagttcaagaccagcctggccaacacaatgagaccccatctccacaaaaaaaaaaaaaaaaaaccctaaaaattatccaggcataatggtgcatactagtagtcctaactactcaggaggttaaag

SEQ ID NO: 645 - DNA, 467 bp, Homo sapiens
attggaagctaaaagttataaagtaaaatacccaaagatttaattaaatcagtaagcatttgttgcatttttaaccagaattctttaatcatttcctgacagaatgactgtgtattagatctctgcctcattgaaattgtctaggccccctgcatctgttttgagcaagacttcagttgagttccatcttttcattcttttacagtctgtaaaggcctggtgagtcagcgcattgaaaatcagtcatcatcttctgtctatgagttcttagtggcccgtacattattttctcagatccctgcatcattacaatttccatgtgtttaagtctcttctttatgttttttaaaaaaacaagtgaagccagtttctcaaacaggaggtgctcacattctatttattctccaagtgtggagtttgtgcccagcatgtgaccgacaatacagaatgaaaagcacatgacaagc

SEQ ID NO: 646 - DNA, 467 bp, Homo sapiens; identical to SEQ ID NO: 645

SEQ ID NO: 647 - DNA, 25426 bp, Homo sapiens
  misc_feature (8427)..(8427): n equals a,t,g, or c
  misc_feature (22142)..(22142): n equals a,t,g, or c
aagaatacaaagttccagatggaatggttggattcagtaagtaacttgatttttaaagttttgaaaacatgatcaaaacatactttagaatctttcaaccaaaaaaaaaatttttttttttctaactagtaattggcagaggaggtgaacagatctcacgcatacaacaggaatctggatgcaaaatacagatagctcctggtaatgttacattctcatggtattttcagtgtgactagaaaactagcttttttttttttttaagccttctagtaacaataatgctacttttaatcttttgacctgaagttatctgtttgttttaaattgtagacagtggtggccttccagaaaggtcctgtatgttaactggaacacctgaatctgtccagtaagtttgaaaaatcttaaaaatctacttaagtaacaacagcagaactctttgaattttgtctcttctctttgttactgctttattttacactgtggtttcgctgccaccttccctcaaagtcctccaactcctttgaagtttatgcctcatgcctttctcaggtggggttcatcatctgaatcattaaacacagaaaatggttaaaacaactccatatctactccagtctctacttgtaaagccacgtgtagcctggagaagaatgcacagtcaggtcgactggtgacacttaaaactcagacattaagctcaagtggactgttgtgttgcctgcatttccctagttccattcacttttccactcctctcccaggctctttaatactgtatttccccacctccaaatcttcagcatctaaccccacgctctcccacttaagcttatttactgagaaaatggaagcaaatgataagaagcttttctttttccctaccactaaacctaccagccttcatttttcctctgttcacatagtactcaggtaattgctttccttttgtgttcgagtgcctaaagccagccctttcttcctactgaaggttcagcttgcagttgtactttcttctgcattgttagttctccctcattactaggttttttcttttcttttttttgagacgaagtctcgctctgttgccaggctggagtgcaggggcacgatctcggctcactgcaacctccgcctcccgagtagctgggactaccggtgcatgccaccacacccagctaatttttgtatttttttagtagagacagggtttcaccatgttggccgggatggtctcaatctcttgacctcgtgatccacccacctcggcctcccaaagtcctgggattacaggcgtgagccacttcccccagcctgattttctttatggcactttccaaataatgtgttattcatttgacatgttatttttacttatttaatgaaatgaagccactctagcaggaaccctgtttctttgagtgctattaccccattacctagaatagcacctgcacatagttgatatttaaatatttgttgaatgaataattgtagcatatgagtaagcaaaatggtagtttaaaaatgtaaataaatcatttagttcttggaagaatcagtttaattctgagataactttagcattagagttctttcttggaaattttggactattcttaaaaataaaaattgtatatctagaaaatttttttgcataatctctcaatctttgacccttgatggcattttctttcagttaaaagtaaaagcattgttaaagttagcatcaaggcacctaatcctgaactgggataggaggagtacttggttatattgttttatatttctctatttgaataagcttgggtatgctacagcttactatttaaatattaatttgttaacaggtcagcaaaacggttactggaccagattgttgaaaaaggaagaccagctcctggcttccatcatggcgatggaccgggaaatgcagttcaagaaatcatgattccagctagcaaggcaggattagtcattggaaaagggggagaaactattaaacagcttcaggtattgttatttttgtgaaatggctacttttgatctgttttgatgcccatttttgtccacttcttttgttaatatatattatttctatgattgtaacaggaacgggctggagttaaaatggttatgattcaagacgggccgcagaacactggtgctgacaaacctcttaggattacaggagacccatataaagttcaagtaaacttaactttatactttataaagaaagagtgggttgaatggggttgggcaaaatatgcatgaataattaaaatgttttgagacatgctttctaaattagctaactttttctgctttagcaagccaaggaaatggtgttagagttaattcgtgatcaaggcggtttcagagaagttcggaatgagtatgggtcaagaataggaggaaatgaagggatagatgtaagtaaaaatacccattcagaaatggttgtatgctaattcataaatataatagtgttttctgttttgtgttaagtagctctaacattgttatccttttatttcacctttatactttagaatacagaattctatatatcttgttaccctatttactataaatatagaattatatgtacttttatgatttgaggcagattttcaggaaatggcgcttttttaaaatacttttttttactttaaaccctgagaagctagctttcttaatacttagtcttttttacataaggtccccattccaagatttgctgttggcattgtaataggaagaaatggagagatgatcaaaaaaatacaaaatgatgctggtgttcgcattcagtttaagccaggtgagtacatataataatcttgtaagtgttggcagcagtgagttttgacatacatttattgtttaattaattttgtttctttgttttgaagatgatgggacaacacccgaaaggatagcacaaataacaggacctccagaccgatgtcaacatgctgcagaaattattacagaccttcttcgaagtgttcaggtttgatagaaagttaacattttcattttttgtttttatggaaaagtattttccttcatgaaatctgaagttacctctatatcagagtctgcttgatgatgctttattaatggagaaagtttaaattgctttaaggtaaagatcttggagcaggaagaactactaccttaagtgctaccttatttactcttgtagttttaaaaaatgttattactttattagggcccagttcatctctacatttcctgatcaggtatatgagagctgggaaaaataaacttaataattttatcatgaaacaaaagtatttctgtgctgactcttcgttcttgtctttccctctctataggctggtaatcctggtggacctggacctggtggtcgaggaagaggtagaggtcaaggcaactggaacatgggaccacctggtggactacaggaatttaattttattgtgccaactgggaaaactggattaataataggaaaaggcaatgtattttaaactcttaatgttttaacacattattcatttttctggacactttctgttgctgtcgtaaacaagtggcaatgctttttctctgaccgtattttagtagaaaagaattcttatgttaatatgtaacaagtaaaacataaatgagggatctcatgtatatttagagaaagagcaggattttaatcttactagcttctagagaaagcgaactaagagataattattagcataagaaatgtcttttgacccaaaaagtggtttgagtgtttttgtttgtgcattttggtttttcccgactcatattttaaaaatttgaatgtttataagtgtattagtttatatttacactgcttttaaaagcagttaattcaaatattttattataatcacattaagtttatgtttaaacatactaagtaaatgtaaatgtattttaagagaagcatgaaatgcttcctaaaatttgattttcagtgtagaatattaaatgaaaaatcttaatacaatattgtcaattaggatactgaccaaaccatatttttaatggcccatttaattgtgaccattttcttctaaatagctcctagtacacccttgaaacctttagagaaattactgtcttttgattttaggaggtgaaaccataaaaagcataagccagcagtctggtgcaagaatagaacttcagagaaatcctccaccaaatgcagatcctaatatgaagttatttacaattcgtggcactccacaacagatagactatgctcggcaactcatagaagaaaagattggtgtgagtatactttaaacttttaatttttagtgtagacccttagactgtagttaaattaagacgtttattcaaatacatcaaaggaaaatgtatcattactagtcagcatttatagatttcatgatatgtataatagatacaacgtgaagattttccagcaatgaaaataacctaattaaatgtgtagttacaggttttgagaacaaccttacatttgggtgtggctagataagaggagggtagtgttacctgtaggcatgatattagtgttggtgtaggattgtggaacatacttgaaggacatagttaacgggaattcattatttattaagattttactctactgaaccccagcgaggcaaacaagataaatcagatacatctgccactctacagtagaaattcataaatcctaggttttggactggctcacagatcatctgggggtattaaaatgtagactatttgggtgcttcccactcctacacataatatacagagacagacctgactcaaaatgtctgggatagggcccagcatctaattttacatagatgtttgggtgattctggtgcacagacaaatttggaaatttttcctccaggaaagttttctgttagaacaaaaaagtatgaaacgctttgactgcttttttgtaagtgaggcagacagtgtcttactggagtttttaacacaaagtgtgcagggggcatcttaaattattagaattgcctaggaaaaattatttttggtgtttgccatgctgtgaatggggtgcgtgcaaaacaaggttgacactgtttctgtcacacttgggaagaacacaaatagatgtacaaaagacgcttaaggaacgtcttactaaatgtacacaaacattgtgagttctgttgtatggatagtttaatggttcaaaaaatgaagaggatgtttgtagagtaatgatagaggttgatgccatggcaaaaaaatgaatagcactcatcttggttttttattttacagtattagcctaacatgcatgcgtcaggatttctgttggattcatggaaaaacaagatagattgttttggagaagcaatttggtgtggtgattaagagcatggactctgtagtcgggttgcctcagttcagaattctgtgaatcatttactggttctgtgaccttggagaagttactcaggcttttctgtgccttggtttcctcctgtaaaatgaagataatggtatctacttcatagagttgtagggattaaatgaatgttcatgtgtgtgtcacttaaaagaatgcctgccacataaccctaaaaaatgttgctactttttcagtattatttttactacttggaaagaataggtcatggatagtaagtgagagatgacagcaattggagatttaaagagacaagttaatagaagaactttaaaggtcatgaagtttagtttccctattttgcagtgagaaattgacgaccaaatgtagtgttagcattttgtccaacatgtcgcctggttgtgttaactactcagaaggagcattttaggacagttaagtgtaatgtctttgttggcttaaccaaacagaaatcagttaagcgttattaatgatgtggcatgcatgcatgataaggatataaaatatcctgatttattgaaggaattaaaaagggaatttttgtgctattaaacatcatgatacatgaaaggccaaaaaggatataaattattgatctgaatgggattttagtgacagaaataggttgtgaggtggattttagtttcatagtgaaacaactagctattaacgttatcagtgaaatgttcagaagacgatgatacaggacccaagcggtttgggaatatattgtcaagacggttgtctcatgttaggcaagtagatatagagagaagagctgaagataaggacctgatttctgtgagtaagatggaaaaagatagtaaaagtaagaatgataaaaggaaagggaactactgctgtccgcaaacaagctaaaggaaatttaattgctaatttaaatttaatttaatttaaattgcatttaattgctactgctattgattttagtgaattttacatgtctcattattatggcagatgaaatagtttttgcaaaatgaatgaggaaaggaaggaaaacctaaaatttgttatttgtgactataagagggtagaaatggatgattatttggccgtagagttgtttaaccattactgtgtttttctgatttttctatgtcatccttttttttgtagggcccagtaaatcctttagggccacctgtaccccatgggccccatggtgtcccaggcccccatggacctcctgggcctccagggcctggaactccaatgggaccatacaaccctgcaccttataatcctggaccaccaggcccggctcctcagtaagtattgggtttagttctgggctttccccaaagattctagttttgggactgttttttatgctgatttttcttttcagtggtcctccagccccatatgctccccagggatggggaaatgcatatccacactggcagcagcaggctcctcctgatccaggtagaagatgcttattatttgtgtgttatctgtattattttccactcctgttacattattaaattttctagtgttgattctacatttgtatgcatcaccttcactcactttactctttcaacagtgttaggcactgcctctaccccagtgtataggactgacatgaatatgagctctgcttttatggaatttctttctacttgcctttggcttatgagttgatacagtagaatgataaaagctaaaagctgcaggaaagagcacagtgtcataggttttggataccagtgctgtcaaatgtgtagtatgttcattgtgacattatctgtggaaaaatagtttttacttatttagaaaagtatgtgataggggctgggcactgaggctcacgtctgtaatcccacctattcagaagtctgaggctgaggcttgagaccagcctgggcaatatggcaagacccatctctaaaaaaatttgttttaaattagccgggcagggtggtatgtgcctgtacttgaggctgaggtgggaggattgcttgagcctagaagttctagattgtattgagctgtgggcacaccattgcactcccctgggcaacagaatgggatcccatctcttaaaaaattatgtatatatgtaacagtctatataaatatatatatataacagtccaacagagtgttaagtattggggcattaaacttccaaattgtcaaataagatatctgttctagtactcctcatatgacaacttcatgtgagtaaaaatcaggcctgtatttaataactgcatgctaaagcccaaatacgtttaattattttctatattcagatttatttttatcctattatattctggcatctttccataccctgtagtttgctttccatcttggtcaaagagtcattctttgaaaccaattaacatttatttatgatccttttttctcacctgctacctaccttttaggcctctttcactcgtgtagtttcaaggaaaatatactcaattatggaatactttctacacataatacatttatcccaaaaaaacttgaagtaatttatgtaaatgaaattgcttgattaacttcataggaagtgtgctgtttggaatatgatgacacagcatgacagttaccaagcatgacttgagttgtgctaggatataggtgtgcaaagttggggttgtgttctatagcaaaagaatgcactcccagcgtaagcaacactgatggaaggggctcacagggtacaggatataatactcttaacaactaatttttggagaatgaaagggcttttctttccctcttgttggctgattgggatggtataattaatgggattgaagagtttgagtaggttaaaaggcagattcatattgggtaacttggatctgcccaagattgtatttttgaaccactactggggtgttagcatgattgaggaaaaatgatgggaataagaagtggaagtggtctttggtattcacaagttgaattcctccacttggagntagtagtgaaatccattactgtaagagctggtcagtgaaatgtggttgcagcatggcctttgggcaagaagtaacccatttaactaaaaccagctggttggccccactcagatttatcaaagggttactgggtccctgggggtggatattgcttatattagacttagaatagcatactgttttaatattatatgaactaaaatgtttctttaaaaaaagagtggtctgttaatggatttatgtagtggtcaagaatttagacttcagagtcaaataaacctatatcagtcctagtcctacagtttactaattgtgagatgtcaagcaagtttttgaactcctctaagcctctgttttcttatctataaattaataaatgaatgaatcgggttgagtgaatatttagtaaattcttagtacatactagttatttgtaactgtgagactggttttttggtatggttttcacatttgggagtagaaataccacttcctaaagtctgttttatctcaaattctctatccaggcatagtgtaaagtgaaatacctagatttcttgattaatatacagataatggccagacgccatggctaaaacctgtgacgctagcacttcggaaggctgaggcgggcggatcacttgaggtcaggagttggagaccagcctggcaaacatggcgaaaccctgtctctactaaaaatacaaaaattagctggatgtggtggcaggtgtctgtaatcccagctacttaggaggctgagacaggagaactccttgagaattgctccactgccctccagcctgggcaacagagtgagacacttcatctcaaaaaaaaaaaaaaaatacagataatgacactattgagatatgtaaacatccaacataaaaaagcagtacattgggcaattgagaaaagtttggcaggtgtcctaataacaccttacaattatattaccttgcaattttctttttctagaaattcttgctcatttttctcaaacttgactaacctttattaagcagctgagaattgctactgttcagaatgaaggtataatagaaaatttaaaagttttaattgtatggtattcctagtataaaagacaatcaagttttttctggtttctagaagattgaaaggtctcaaactgttcgcacttcagttgatgtgggagatgagtgagggtcagtcaagtgtagaggagacaacatagctaaaagccgagacacgggcatagtgatttctgaaaagtacaagcactgtgttgtggctggagcttgggtgttgaagagatacaaccaaagggagagatgaggctgaaatggaaaggataagccaggggcttcaggctgttaaagatgttgaatgataggctgtacttaagctttgaacatcctgaagattgcagagaatgaagaatttcaagtaggatgacatcaagtttataacattcaatgtgaaataggatgaaatgtggctaatcttttttaagatttttatattttctcttcattgaaaataaggacaaagttcattgttctaaaataattttctttcttatacaggttagtccctagaaatgtttttctttagtcatcttctagatagagctgtttgtgcttgaggcgaaaccaatttagaaaaaaacaagggcacaggatggtttgagacagagcattggatttggagccaaaagacctgtattcatatcccagttatgccactcagtagtttttaacctaggaaagtcacttagtctctgagacttggttttctttaataaaagctgatggtgacaacaaaaataatagaaaatttaagttttcatatactttttttaatgttctagttaattttgggggctgtatatttgccagagagctgggcgggggggtggtgtgtgtgtgtgtgagagagaattacagacttcacatgcaaaccttgaactttcatttattttagctaaggcaggaacggatccaaattcagcagcttgggctgcttattacgctcactattatcaacagcaagcacagccaccaccagcagcccctgcaggtgcaccaactacaactcaaactaatggacaaggtaactacagaacttattgtatgtgaaagccaaaagttgtgcttggaattatatatgaagtacatcactgtataatacctaaaatttctgacattatttaattataatttaagcagacttttccttttttaaattgttactttgaaatagtttcaaactttcataaaagttgtaagaagaatacccggagcacccagatagcccagctgttaatgttttattcccttgtttactctgttaccatctatatcatacatgtgtatctgtatttattttaaatatccattataattagttctgaaggaagctaattatatccagcataattagttctgaaagaaatcactgaagactaaactgtagacatgatgtcctgttgggtacttcttcaaaaatacataaccatcatacagccctccaaatcagtaagtcaacattgatatattaagttctttatatcattatggatttctgatttttgcagtaggttatatttttaaagtatttttataattttgataatcagattatcctggatttggccagtcagggagtatattcagggtggtgcctatatccttttgaaatacctgtcattcttttaagcacttccatactgtctggcacagtaagattgttattttgtgctttctgggctccagccctcgagtcagctatttcttcaaggagctcttattccttttagtagagtatggtagttagaaacgagacttgagtatgcttgttgctactgaggtgtaattgcttctagcttctttcaacaggcagaactaggaaatatatttacatacatgcatacctacatacacacaccaaaaaacacataaacatcgatatatgtatatatttttaaaaactatgttcatatcaccacatccgtttcagcattttggggttttcaagccttttccttttttgtacttgtttacaaacgtgagaaacctggtgtcctcagtgtatttccttatttgacatgcatttacttatatgttcaacataaccagtcttcaaacaggttggttttcttttctgtccaccacctctgtacccccagtaccttctatctttggcactgttagggatgccaccaccacatagtacttccctcctaccctcactgtcacattgcaggcccctgccagctcctgcacccaaggaaacggccaaaattgccttttaaaaactttaattctgttttttgttttgttttgcttgaacaaggagatcagcagaatccagccccagctggacaggttgattataccaaggcttgggaagagtactacaagaaaatgggtatgttttatacatttcttgaaaatacatacttaattaaattgaaacaaattattctcttcaggaagagaataattgaataaaatcactggacttgtaaacatatcaagacagttgtaaattatagtttttaaatttgtggttatatggcaaggaaatttttttttctaattgcatttgtcaaccagttattaattgaaactagaaatgtccttactggtacatacaatattaacattactatacttttgacaatgacagttatatatattatcagtctaaatgacataaggttaaattttaatgtgtcaggcgaaaattgtgtgtgataccattatttttgctgcaagataagcaggtaagaagtaatctgcagtgacggaaagtaaccaagtgatggaaccagaatctggcttcaagagggtctgagtcccaagcttgtctcccaaatttgtctctttaggaaccatttggaacctgatactatacttctggacaaatcactatatttcagctgcttttgctcttagtcatttaaaattattacataccacagctagatgtcacaaatgaaagctaaattggtaagcttggttatccttcactagcagaaaaagaacctataggtggtagagttttgtcataagagaacggtctacttgggattttcaatgttttctttgccaaagaatgtttctcattctccacagaaagaaaaatttccagaaaggtgatgattttaatcttctagatgtaaaattacatatacctgatgataaagttgttttgcacaactggtttctttttaaagaaaaattgtttttcctcttagaatggcttcctaggagagtcatgttccgtctctttctgaggctttaacagattatgtttttgtgacctagcttaggcagatctacagtagctacaattcggcaaaaagaaacttttaacttaaaaacagcatactctgattaaggttggttacataatttattttctgaactgggatcctttttagaatgaatagggatgctattaataatcatgccctgacagcattgtggtcaggacctgtaatcaacttaactttaattaaatagcatcaccattttaaaagacttgagcatgagccacgtgcggtggcacacacttgtagtcccagctgcttgggaggctaaggtggaaggattccttgaacacaggagattgaggccagccttggcatcatagtgagacctggtcacgtgtttgggttaaaaatcactaacttcaacttctattttctcaatgggtaatgtcccctagatagggtccctagttattattaagtaggtaaaaataaaggcttgttaatggatttaggtaattatggaggaatgagtttggcttctgtgctttattttaccatattgattatttgtaatatggccattaatacatttactgtttagtcttttttgtattactttttatgttttactcaaaatgagtgggtgggtggaattctaatttttattgttaagggaagacattttaccttgtctttaattttttatttttttttaccatttccctgccagttagagatactatactatactgtcttgaatcctctgtaggaaaacatggcatagaaataattaaataataattagatgttaaataataatgctgtatgactaaagaacctccttaccccaccttttctgttgttgttctgtagtaccacaataatcacttgttaattttatttatttatttatttgagagggagtctcactctcgcccaggctggagtgcggtggcgcaatctcagctcactgcaacctccgcctcccaggttcaagcgattctccggcctcatactcccaagtagctgggattacaggcgcctgctaccacatccggctgattttttgtatatttagtagatacgggctttcatcatgttggccaagctggtctcaaactcctgacctcaggtgatccacctgcctcagccttccaaagtgttgggattatgggtgtgagccactgcacccagcctcacctgttaattttatgagcaaaacagattagttgggcaagtccttcacatgcatatctcgttgttgttgttttttttaagacggagtcttggtcttactccccaagcaatggtgcgatttcgtctcagtgcaacctctgcttcctgggttcaagctattctcctgcctcaacttcccaagtagctgggattacaggcgcccaaccacacccagctaatttttgtatttttagtagagacagagtttcaccatgttggccaggctggtctcgaactcctgacctcaggtgatccacccgcctcagcctcgcaaagtgttgggattacaggtgtgagccactgcgcctggccacatgtgtatatcttaaaggaaataatgctaggtaatttagtcaggtgcttgatgagcatttgtcatcatcatacggagtcaatttgtctttttctataaaagttctttttgtaaatgattagttgcttaactgctttaatttcttctaggtaccttacctgtcatcaggatctttttaccacaaataagaaaccttaaagcataaaacttggttcagtcttcacatttcttaaatggaaggagaaagggaataatagggagatatctttatctcaaagccaactgttgttgacttttccagtggcaggggtatgatgctaggacttcagatttcctgattccccatcctagtgccccttttgccaaactaggcaggctttcacagcttttggagcctaatttaagtttttcttgttaagaacagaaaactccattcatagattttaatttgtcattatttgcttatttactgaaaaaaaaaaaaaactattgaaaacaggtgtgggttaagtttcccaaaattaggtttatatttcaaaacaattctaagttcccaaggataacaccaaactaagaggataaatttttattttatttttttttattttatttttttgagatggagcctttccctgtcgcccaggctgaagtgcagtggcatgatctcggctcacttgcagcatccacctcccaggttgaagcaattcttctgcctcagcctcccaagtagagaaaatcttgataagatttcagaggcttataaggaacagcagtaaagatgggtgtttttaaagctagaatacagggatttttttaagacccttaagagaacaaacagggtttcaaaatagaaaggagtaattcttgtttggagaagtgaagacatttgggaaaagtttgacttgaggaaggccattatgataaggactgatgtggtagactctgaaccctgaagaatctggtaccttaagcctaaaggagggtagagtgaggacttgtgggaaaggtacagttatatgggaagacaactgagtgtgaaaatctattcatgcaaggctggctcttaggctctaatagaatcttgcaagctaactctagagcaagtcttttatctttgggatgaaagaaatttaaggctaaactttatacattataattataaaactataataaatattagataatgttctactgaagtataaactcaactatctggcatcaaacagtaactaagccatgatcacaccactgccactgtgttctggcctagtgtgacagagcaagaccctgtctcaaaacaaaatccagtaactaaagagaggaataaggggagcgcaaggtaaggcagtacatgtctgaaggggcagggaaagagttctttctctacttccaactgggcaaaataaatcacatttgccctttagattggaagagtgaaataagcttttcttgaacatcttttaagattggagtgtcaaatattaccaacttatttaccaagaatttggtttttcttaaagtctaaagtgtttactattagctttccacagggatataggagtttgcagaggttgtagttttttaagggaacatcaatgaattttcttgatgcatatgcctgtttctaccattttacattgttaatttgcctctaaaatgagtaactcttacaatggggtttaaaacctgaagactattgattgctaccttgatcaggtttggtttcaagtgtgcaccctgtaagagacaatgtgtggttttattgctattgtcacaccagttttttagatattgaaacctgtttcagatttgcttgaattgtgtcttgtaagaggaaaatgttaaacttacttcctctttgagaacagttatttatagaagacaggaaaatatgagaatttttaatagtatatgagagttctctgttaccaagaaaagagggtttttttcaggcatttttaaagaatcataaatcttaaattctttcactcagttgctttgagtctgtgacctgttttacaatggtgatagactgctttctgaaactatgaaattggtcttgttggcatgctcctacaaacataaaaagagcttcctgtgtgtccatgctccagtatactcgtctatggtagttatttcacaaagccaagcgagttacaaacgaaataaaatagtgcttaagtaaagaaactgaataggagaacatatactctctcttctcaattttatatttagaaaaatataccttcagaaattggggaaataggcatcagacactcagcttcatcattttttaaaagtttgctgtatgcgctttatatgtatgttttttgtgtatgaaccatttcaaagtaagttgcagacaagacagtttgctctaaataaactcaatgtctgggcacagtggttgacgcctgtaatcccaggactttgggaggccaaggcaggtggatcacttgagtccaggagttcaggaccagcctggacaacatggcaaaaccccatctctacaaaaaaagagaaaaatgtcagctaggcatggtgggcctgtagtcccagctactctagaggctgaggtgggaggatcacctgagccctgggaggttgaggctgcagtgagccatgattgcaccgctgcactccagcctgggtggcagagtgagaccctgtctgaaaataaataccctcaatattatcacaaacatacagactatatttaaatttccatagttgtcaggaatatgtcttttgtcgtctgtgtgttttgtttaattcagagtacattcaagattcatgcgttgcatttcattgctatatttctttaatctcttaattcagcaaagtcaccttatttggaaaaagacctgattgtgaaagctgagttttatgtgttttcattgatcttgttctttattccttgtcaggttacttttaataacattgtgttgtaattggaataaattattaatacttttaacatcttattatgtgtgtgtgtacatacactttataggttactaatcaggaaaaagtcttggctaggtcttaatacagtctttaaatcattgcctttaagtgggcttaaagtttttcaaaaatgttctttttgtaattctggaatcgaattaagattatgcctaaatctttaccttccttagctaaagcagtgtggatttggggttgattctgtttttttactaataatgacgctctagaactaaaagttaacgattaattataaggcaaaaagaaaagagcgttctttttttttttctaattgcagagtagtttcctgacactactaaatgaatattttaaataaaacaggagtaattctgaccctctgtgcttttgtcttataacctgtacttacagtggatgtaattttatattaaagtttaggggtttttttttttggtcaacaagggcaaacacaagattattcaaaggcttgggagaaatattacaagaagcaaggtattgtttttattagaaatgagatgttgggcttataattgtggttacagcaacaaagttcttttttttcaaaggtcaggcagttcctgctccgactggggctcctccaggtggtcagccagattatagtgcagcctgggctgagtattatagacaacaagcagcctattatgcccagacaagtccccagggaatgccacagcatcctccagcacctcaggtataatgtaattgctaatttgttgatttctactccagtctgttttctgcatgtttactgtttgtctgtttgggagtgtttgccttttaaatttttatctggcaaagtataataactatttaaatgaagtactacggtgtattgtttgggtttttttgttttttataatgctttccagcatctgagtggtgaatatttctgcaatgcctttgattttaaaaataaattttcttcccccagggatttgcaaatcatgcaagaagccaccaccatttatattaaccactttttctttcttaaaggattcactcctgaattagctccatttcaaggattttctttaactttttgtgtatttcttatgtatctcttctgcacagggccaataataagaagtggacaatacagtatttgcttcattgtgtgggggaaaaaaacctttgttaaatatatggatgcagacgacttgatgaagatcttaattttgtttttggtttaaaatagtgtttccttttttttttttttttttgaaaatgtacaaaatatctatcactactgataggaggttaatatttctgtgtagaaatgaaaattggtttgtttttagtatttagtgtagatgtacacattccagcaaatgtatttgcaattatgtggttgatgctttgtgatataaatgtactttttcaatgtatactttcacttttaaaatgcctgttttgtgctttacaataaatgatatgaaacctcctgtgtcggtaagttggatatgtgggtatttaaaggattcataatttcttagcaatgataaattaagatacatatacacaaatatataagctttccccatgaaatattgagtttttaaacactggcatgtttttccccccttgcagtatagtggtagattggaggatcttttccatttattgtattggctctttcagcacaagtaatcctgatatcttcattttttttccttctgtttgattaaaaactgcatgtgtgtacaatgatcttttggcatacttccattgcattaacagtgaaatttccttttatacatgaccactgtttcagacctgtactgctgctataacagttaacctttctgttcttaatttgataatacttgatttccaagactgtttcggcataactaattttaaacagttttcagatagtgaatatgagtagtctaataagaacagtttttttccatgtgaagcaactctttcaatgtatataatgttagtgtgtttctttctaaatttaggatagaaaagtgaatagtgtgcaaaaagtatagctacattgcatctgccattgaaacataaatggggtatggaaacgttcaagctttttttttttctttatgcagtatagataagctttgttttgtaaatgcacaagtccaatcattgaatcaacttaatttttttatgtacttgaagtcattttattactctttaacactcatgctgaagttctgatattttgttgaaatccattgttttactctttgcatatttgttggctctttgcatattaatatattagactacatgcaaatacagtctgtcttgccattgtctgttgaagtgcaggtttgatccagccagtatagaactagctctgtaggggtgaggaggactgtgctgtgtatcatccttgattgtgttccttcaaggagcattgcactgtaagtacatcagaatgacaaattgcatgaactgcaacagtatctttttgtcaatgttccacataatgcaaatgccatacgttgtgtgatattatgttggaatacagtgctgatatcttggaaaaccataactgcctcttaatttaacatagaataatacatagttctgtattttttttaaagtgagcttaatgggtaagtattttttatatgctttagctatagctaaagaaaactgatacttaacaaagttgaatagtattattcactggtgctcctaaaatattgtttttcagtgtaaaatatgcatatcttctatatttaatatgaaagtcttgaaatgtatcagacagaaggggatttcagtttgcaaataatgagcaatgtagcaattttaacacatttcataaatatatattttgtcattggtggagagcaccatttgttgttttgaatatactttaaaggaagaggtacaaggacataaatgttgagattacctacaggatggaaatagcagtacagttcattgtagatattttgaaatgtttttgattgttttatataacctagagtgacttcccttacccttatttagatctgcatatatagttctagtatgaagtttaatagttaaggagttagctatttgttatctttaagagtagggtattgacgtgaacaattgcagtattttgcatgatactgttttatagatgaccttttaggaaagtggtgcatttattaattgaactgaagaagtagttcagttgaattcagtatcataattcacaattggaggctgttgattttgattcatttaaggtttaaaatctttattaattgcaaacagtgcaattatttatacttcacagtgccttcccagaccttccaccttaggttctgctgcaaaaagcaccaggtaagcacaacctaaggacatatataaataaatatttcaatacattaatgttgtccctgtgaggtttttgtggttgtgtattcaaaggcaatctgctactgcttccccaaaatgtattttgttattttatgctaccatcttagtggaaagtctgtaagttgttaaagcaactgtttacatttctgggtaatgttttttattttacttttttttttttattaagacaagaaaatgatgagtagattgctgcagtaattgaactacatccaaatctttttgtattttttccccaaatatagaagtgttaatattaagaaaggacaattacacagttttcaagatttaggaaatcacttgtttagaaacttcaacagccttcacaatctgttttatatgatggacagaaaatttctttgccctccaaaattataatttctttatttttttcttattcttaaactataataattcagtaaggatattatgggttagaattttattatgatttttttcttagacaaaagttatatgctgaagaaggaaaaagttataaggcagtatgttttgataaaaggcatgtgcatcagtgaaatgttaactgtatagcaaataacctttcataatctgtagcatcagtatttttctgatttaataatatttaataactgacgctgcatttaatttttttgccagtttaaaatgtttgtgtgtttttatagatgattttaactggtacatattttgagttaagttgaatgtatgaaagcagcatcttatcagttttgtttattcgatttctaaaatgtgctgatccttttaaaactcctgcttatctctgcaacaaagaaaaatattcaaaaatactgccttcattttcacacacagtgctgaagatgctgcaagcaccaaatcatagctcataaaatcaggtcctgagatagttacccataaagaggaatcctttgagtgtatgccattggtgagccgatgagcatggaccatagaagggctcaatgtagaaggtaaaattggcaaatcataattgagaaatatgaaatgtattcccatacataatatggtatagggtgtaatgtacctgcttttgatcacttttcattttaaagtgctattcacttgatcttaaatgttccatgaactgttaaatttcttaagttacatagttactacaccacatttatgtgtatgttatgttttaatagtcaatgataggtatgtacaattgataatataaaggggctcattgaaacttgagagcctgttgagttttggttagttgtagattgcatttttataaaaaaaaatacagatagattgatgataatagatattggggcattgtttctgtctcatgagaattcttttattcattaccataagccttcactgatactataagcattattttaaatgacgctgatcttaagtctgaaataaatggaaagcagaaaaggtgagccagttgatttgaatgcattggatattagtgttagaaacaatgtatagtttagattgaaactgaactgacttatttagcacttaaacaaaaattgacaatgtttntagttttttttaagacagcttagtgtggtgatacttagaattctatggtttgatgtttcttttagaaatgagaagtatagttttattttttaatataaaaaatggttttaatactaaaactagtaatttgatactagttgtttataaacattgtaaaatatatcttttaaacaaattatcttggtagttaattcataagggtgggtttgggtaggaatagcagagtactttcagagggaaaggggagtcattcagaagtgatagcattttatttgtttgaatactctgccagtaaaatcagctgtacttagaaagttatctgttgtgtagaataatgatgtagagtttactaatcagtgaggatgtcttgtttttattttctgcaaactctgcctcactttaaaatgcattataacaatacctaattaaagataattttggctctgaaagttaccttattttttgttgagttagtgacttcatttttcttgccacaatataagcttttgagggatttttttaaattggtgcttttaataagcaaataaatcccagggttttattttcttcagtgatacccctatagaaactcttaaatgtattggcgcatatatatatatatattttcttatgcatgctcgatgcattttcgtcctgagaaaaatgttctctacagaaactacccgtgtgtaaaaagaagattggcttaaaatggctactgtgatgggaacagtgtcttagggagatgcagcttggacttgaggtaaattgaatactttacaactgtggtttagagtttgctttaatgacattgtatgtaaaaggtcacatgattgctgtaattttgtattcattatggtttcctcaataaatgtacattgatgactattataaaggagtgctttgtgttttttatacatatattacatggtaaaattttctacttgactgggtttttttttatgtttactgtgagaaaaaatgattttaaaaagttttaatgataaaagggtaacatctggttgcacaagtcttaaaatacagaaagacttttaaatacagaagttactttatttgggttcacgttgtaaaataaaattgtcttccagaaaattaaaatataaaacaacttaatagaacgtaatagctaattatttacaaactcattttaaagactagaattttaaatcgaaggttgtgccactttttccctaagtctgatacacttagatcttgaagccttcgactatgttgaaagtgttttctcttgcgtgaactattaatagaaagttttttcattaaaatataatttgttcaggcaagatcacaacataaatttgctttataaatttaatatatattacatacgtttgaaaaataacatgtttaatatcctcaacactcaacactgtatagccattctttaagtcctttaatttttgtttttctccatgctcctccccttttcctctgaaaggagtgacagttttccccaccccgctccaatcccaatatatctgcttcagaaagactttgaaactacaacaaccaaaatggtgtactactaaagaaaaagtccactcaaattgataggttccaaattaattatctcagctatttcagcctaattttaggtgtaaaaagctcagaaatgacattccttcatgcaaaataatgtattctacttaggtttgtgtgttttttttttgtttttgttttttaaacatagttgctgtaaacgtctatgggaaatacagtctttataataggttctgatagaataattgagtaattcccccccataagtacattttattgactgttactgcataataggcgataaatctgatgcttatttggaaaagaagtaggcattctttagatgagctgtgctttgaagactgttatgaaaaggaataagaagtcagcatagtggcactcctggtttccttttttggccccgccacagaaaagatggatgtagtaagaaagttggagtgaaagagaaagttccagggagaggggaggggagctagtagtcatcagctaaaaaagagaagaagaaaagtgattttaaggaaaaaaaaattaatagaataaaagataaaaagagtgattaattcttactttcaatggtaagaatacaggtactagctgcagatcctttattgttgactgctttacacatatactctcctccatcttctgggaaagtttctggtaagtaaaggcagtaagtttctcccctttcaatatattgatagtcttctccatcctgcagtatttctccttcaaaccaccatgtaatttctggttgggttctcctgttactttaaccgtaaatctgactggctcactgtctacaactgatgtgtttttaagaggcttcttgaaccatggagctcctgatctggtttgctcttcatcttcagcagtggagccattcatgatgctaccttcttcctcctcctcctcttctcttttctgtattaaaataaatgcattcaggttggcatttatagtattttcagggcagcgatttagtaacaattttgaaatgaaatttttttttttaagtaaagaacatacaagtgtgcctactacaaagtgtacttaacagtacattccagtgacttgaaagaaaaccattaaaacatttttttaacctacctaattataaaactatgggttttaagagggcatctttggaaaataaaggatacataagcctggtaccttttgtagtgctgcatcaatttccctttgttcaaactgcatgcgtagtaacttttgttcttcaattcttctttgttcttcttcttctcttgccttagccatttgttcaaatctagctttcatattcactttgtgagtaaatggagcctcgctttttcttgcaggcctaacatcaacatcatcttcctgcaagaaagtgggccaagattaacaattgcttgccttctaaaaacaaagaagcgttactagttctaaaggtgtttagaagcacaaaatgattaacatgtttataatgcatatttttgctacactgcagacactcagattttttctaactctccagttcaggaaaagtgatagatacatttatgaagcattctcttagttatagactttttctccaaatgtaaagatcacaatatcactgggatcctagcctgtttgtcctaccaactctgcttggttttgatagcacttaactgaaaaaggtcagaatgctatacattctaaataattgttaaaagtactcccttgattcctgtaagtcc

SEQ ID NO: 648 - DNA, 286 bp, Homo sapiens
tagaagaacaggggtgaattagagtaactgttaagatgacattctctaaactccacttcaacttctttacagttaatgccttcagactgttccattcatcatcccttcttcacttgatgtgtcatcttaaatttcttaatttaactactcaagtaataagatcatattttttgacatgagtctgagcctagaaccttagtttaagccattgggagacattagacttccatttttattaatagattatcttttatttgtaaacaaagtatctttcattgaaggaaaa

SEQ ID NO: 649 - DNA, 964 bp, Homo sapiens
ctcacaagataatatctcttgcctttttcctctcggagtgttcctgcggtttgtgatctctcttagctctggtagcctgttcaggccttaaggtatctgttcggtattatgtggtcaagtagctgggaccacaggatcacaacaccacgtctggctaatttttttttttttttttttttttttttgtagagatggggtttcgctatgttggccaggctggtctcaaactcctggcctcaagcaatcttccagccttggcctcccaaagtgctgggattacaggtgtgagccaccacgtctggcttggagggcttattaaaacaccgattcttagcctcacccccagagtttctggttagtaggtcttggcagggctggagaatttgtatttccacaccttccttggtgatgtgttgttggtagttcagggagtacatgtgagaggaaccgtttagatagtaaaaactgcaaacctgaagaagaatagaagaatccttattctgtgctctcttagatttagtttcctcatctatgatcaataactattcatttcttcctcatttccaataacgatttgctgcttttaagagcaagagatcacttttccttcatgttgttttgctagtggcaaatcagaaatggtttcgccagtattcactgatcttgtaatcactctcggaatccagctgcatctctagtgtagagttttgggtcaacaagaataatgctgagcttaaagaattggactcagtctcttgaagtcaggggttgatgagaaggtggctctaatctattcattcaacaacttcctattgagcacctgctatgtgccaggtgctgttctagccactaagatagagcaggtaataacatagggccattgtccttatggaatttgtattttagtggggtgaataaaaaagggcagtctaggtggggcccagaaatagaaaaatagaaaaaa

SEQ ID NO: 650 - DNA, 964 bp, Homo sapiens; identical to SEQ ID NO: 649

SEQ ID NO: 651 - DNA, 236 bp, Homo sapiens
tgggtggatcacgaggtcaggagttcaagaccagcctggccaacgtggtgaaccctcatctctaataaaaatgcaaaaattagccaagcatgatgatgcgtttctggaatcccagctactcagtgaggctgaggcaggagaatcgcttgaacctgggaaacagaggttgcagtgcactcagattgtgtcattgcactccagcctgggccacatagtgtgactctttcccccatccc

SEQ ID NO: 652 - DNA, 236 bp, Homo sapiens; identical to SEQ ID NO: 651
